United States Patent Application Publication US 2026/0191916 A1 - sequence listing, part 3

SEQ ID NO: 2 - DNA, 5171824 bp, Parabacteroides distasonis (residues 1-1,723,942 of 5,171,824)
  source 1..5171824: mol_type = genomic DNA
atgcagactgattatcaaacattgtggaataagtgccttgcggtcataaaggatattgtgcctaaggcagcttttgacacatggttcgtacctatcgttccgttatcatacgaagacaagaagtttaccatacaggtgcctagtcaattcttctatgagtatctggaagagaagtatgttaatgttttgaaagttacattgtatcgtgtaatcggtcaaggaaccattcttaactaccgtatcatggtggataagacaactggtggtacggttgattatccggcggagaatgcttccaccgctgtaaagaaagtcactcccaaggacgctaacaaggctccgaatccttttatgacgactgctccgcaggatttggaccctcagttgaacccgaagtataattttgataattatttcgagggtacgagcaataagctggttcgtacggcgggtgaggctgttgcccagaatccgggaaagactacgtttaacccgttgtttatttttggtccgtcaggagtgggtaaaactcacttatgccatgcgatcggaacccgtatccgggagttgcatccggaaaaaaaagtgttatatgtatcttcgcatttgttccgggtacagtttacagatgctatccgtaagaatacgactaatgacttcttgaatttctatcaaaatatcgatgtgctgctgttggatgatatacaggagttgatcggtatggataagactcaaaatacattcttccatattttcaaccacttgcaccagttaggtaagcagcttatcttgacttctgataaacctcctgtggatttgcaagggatggaagagcgcttgatcacccgtttaaaatggggattgacggctgagttgagccgtccggatctggatctacgtaaaaagatactgaagaataagatcaaccatgacggaatcatgattccggatgaggtctttaactttatcgctaataatgtgacggagaatgtccgtgacttggaaggtattctcgtctctttaatggctaatgcggttatcaataatcgtgagatcgatctgccgttgacgaaacgtgtggttagccaagcggttcggttggagaagaaacagatctccgtacagatgattcaggagatcgtttgcaagtatttcaacttggagcaatcggttatccagactaattcccgtaaacgtgagatcgtgcaagcccgtcagatcacgatgtatttggcgaagaaatatacggactcctctttttcccatattggaaagatcgtaggaaagaaagaccatgcgacggtcttgcatgcttgtaagacgatcaaagaccagattgagactagtaagtctttccggtcttccgtagaggaaatcgaggtcttgctcaagaactaaattaagaatccctatatagtaggataaggacgtctctctaaagaggcgtccttctttgttttggaagatccgtataagtgttaagttttctttttggaaaactatttgatgcttagttttgtttaagtagttgaaaatgtggagttgcaagttttgttttggaaaacttttcaataagtattctttttaacgtagggtaatttggataactggtaaagtatgcgtaaacttgcagtcgcaaaataaatataataattgtggatcgtaaaacttacacttttgacgaagcgtttaaggcttcattggattactttaccggtgacgagctcgccgctaaagtatgggtaaataaatatgccttgaaggatgcgtttggaaatatctatgaggaatctccgaatgatatgcatcatcgcttggcaagtgagattgcccgtgtggaaaaaaagtatccgaatccgttgtcggaacaagaacttttcgacctgtttgatcatttccgctacatcgttccgcaaggaagtccgatgacgggaattggcaatgattatcaaattgcctcactctctaattgttttgttatcggattggacgggcaagcggattcgtatggtgcgattattcgtattgacgaagaacaggtacaattaatgaagcgccgtggtggtgtaggccatgatctttcgcatattcgcccgaaaggttctccggttaagaattctgcgttgacttctaccgggttggttccgtttatggaacgttattcgaattccacccgtgaggtggcccaagatggccgtcgtggagctttgatgctgagcgtttctattaaacatccggactcggaggcgtttatcgacgctaagatgacggaaggtaaggttacaggtgcaaatgtatctgtgaagattgatgatgatttcatgaatgccgcggttaatggcggtacctataagcaacaatatccaattgattcggattctcccgtttatgtgaaggatatcgatgcttctggcttatggaaaaaaattattcataacgcttggaaatccgctgaaccgggtgtgctattctgggacacgatcttacgtgagtctgtaccagactgctatgcggatctggggttccgtacggtttccacgaatccttgtggcgagatacctctttgtccgtatgatagttgccgtttgttagcgatcaatttatattcatatgtggtaaatccgttcactccggacgcttatttcgattatgatttgttcaagaagcatgtaggtttggcccagcggattatggatgatattattgatttggagtcggagaagatcgagatgatcttggctaagatcgactcggatccggaatccatggaggtaagacaaacagagcgtcatttgtgggaaaagatccaacgaaagactttgcaaggacgccgtacaggtgtgggcattacggcggaaggcgatatgattgccgctttaggtttgcgttatggaacagaagaagcaaccgattgtgcggaacttatacaaaagacattagctttggccgcttatcgttcatccgtaatgttggcgaaagaacgtggtgcctttgagatattcgatgcgaagcgtgaggaaaaaaatccgttcatcaaccgtttgcgtgaggctgatcctgctttatatgaggatatgttgaaatacggccgtcgtaatatcgcttgcttaacaatcgctccgacgggaacgactagcttgatgacacaaaccacttccggtatagagccggtattcttgccggtatataagcgccgccgcaaagtaaacccgaacgattccgaggctcgtgtggatttcgtggatgagacaggcgacgctttcgaggagtatatcgtattccatcataagtttgtaacgtggatgcaagcgaatggttattcggcaagtaagaaatatacacaagaagaagtggaggagctagttgctaagtctccttattataaagcgacttccaatgatgtcgattggttacaaaaagtccgtatgcaaggacgcattcagaaatgggtggaccattctatcagcgtaacgatcaatttgccgaacgatgtaagtgaggagttggtagattctttgtatgttgaggcatggagatgcggatgtaaaggatgtactgtttatcgagatggttctcgttccggtgtcttgattgcgacagataaaaagaagaaaaaagaggattgcaactgcatgcaaccaccggttatcgtatctacccgtcctcgtgaattggatgcggatgtggtaaaattccagaataaccgtgagaaatggatcgctttcgtcggcttgttgaatggccgtccgtatgagatctttaccggtttggccgatgatgacgagggtatcatgttacctaaaaacgtttctaaaggtacgatcatcaagagctatgatgaggatggtaataagcattacgacttccagttcaagaataaacgcggttataaaatgacaatcgaaggcttggatggcaagtttaatccggaatattggaactatgctaaattgatttccggtgtgctccgttacggaatgcctatcgatcaggttataaaactggtacagggtatggagttgaatagcgagtctatcaatacttggaagaatggcgtggaacgggccttgaagaaatatttaccgaacggcatggaagcgaaagggcagaaatgtccgaactgtgggttggagaccttgatttatcaagaaggttgtttgatctgcacgaattgcggagcctctaaatgcggttaaataattgactaaatctatataccatgaaagtcacttttaatataaacttccataccgtttggggacagaagttatgtgtagtgggctccataccggaattaggctcttgggaacctgctttggctaaggagatgaattactctggggatggaaactggaaactggaactggatcttccacccgatataaaagatatagaatatagatatttcttaagtgttaatgataagcagatctttgaggagtgggagaagaatcaccggattgtattggatggacaatctgattcttacatcctttatgattattggcaaatccgtccggataatctagccttttattcttcggctttcaccaaaagtttattcgctcatccctgcaatacacatgagagggtcgttagaagtggaagaaaattggtgataaagatatccgctccccgggtggaaaagaatcagtgtgtagccattactggaaatcaagaatgcttaggtaactggcatccggacaaggctttattgctgagttgcgatactttcccggaatggcatattgatttagacgctgcggagatacggtatcctttagaatataaatttttggtttgggataatgattcccgtcaacctttgtattgggagagtgatgagaatcgtattctaagtcttgttccgcagaaacagggtgagaccgttgttatatctggtctttacttccgggatagcttaccgttatggcgttgtgccggctcggttatccccgtcttttccttgcgctcggaaaagagctttggagtaggtgatttgggagatttacacatgttggtggattgggctagaaagacgcaccaacgtatcattcaagtattacctatgaatgatacgacaatgacccatacttgggtggattcctatccgtatagcgctatttctatttatgcccttcatcccatgtatgtggatttatcggctttggggaccttgaaagatccggagagagctgctttttatgcagggaagcaaaaagaattaaacgcaaaagatacggttgattacgaggaagtactgaaatataaattgggttattgtcaagaatatttcgcaggggagggtaaggccgtattagatacgccggagtttaaagagttcttggcgcaaaatgagtcatggttgatgccttacgctacttattgtttcttgcgggaaagttatgggacatcggatttctctcaatggcaaggtaattctacttacaataagacacgtgttcgcgccctatgccgggaagatagtgacgcatggccggagatctcgttctcttatttcttgcaatatgtattgcacaaccagttcaagtcggtatcggattatgcccgtaagaatggagttgtattgaaaggtgatttacccattggcgtgagccgcactagtgtagaggcttggacggaaccgaaatattttaatatgaatggtcaagcgggtgctccccccgatgacttttccatgaacggtcagaactggctgttcccgacttataactgggatgcgatggagaaagataatttctcttggtggaaaaaacgcttcgctaagttaagtgattatttcgattgtttccgtatagatcacatcttgggatttttccgaatatgggaggttccttgtgaatatgtgcaagggctttgtggtcatttcaatccagcgttgccgttctcgagagaagagatcgagcagtatggattgaattttaacgaatctcgtttcacgaccccacatatcaatcgacaatttttatcggaattgtttgaggaaaatacagaagaggtgataggtgcttatttggcacaatcctcctcccggcattatgtgttaaaaccgttctgtgatacgcaaaggaagattgaggcgttgtttgcggataaggcggatccagtttccctacggatcaagaatggcctgtttacgattgcgaatgaggtattatttcttcgtgatccaagagagaccgataagtttcatccccggatctcggcgaatcaatcctatatctatcgggaattgagtggttccgaccgttatgcgttcgatcagttatactggcatttcttctatcatcgccataatgatttttggaaggcgcaagcgtttaagcgtttgacaccgttggttgcgtccacggagatgttggtttgtggagaggatctcggtatgatccccgcctctgttcccgaggttatgaataagttgcaaatactaagcttggagattgagcgtatgccgaagagcccacagcgggaattttccgatatgttcaatctgccttatcattcggtttgtacgacttctacacatgatatgactcctcttcgtaattggtggaaagaagatccggagaagacacagcgttattacaaccatgtattgcaacggatcggtgaggccccggatgaatgtacggctgaaatcgttgcccagattatttctaatcatttgaagactcgttccatgctgacgattattccgttgcaggattggtttgctatggatgattctatcaagcggaaggatatagaatccgagcgtattaacgttcctgcgaattcaacgcattattggcgctaccggatgcatattacgttggaacagcttttgcaggctgataacctgaataataagatcgtctcgttgataaaagaggctggacgaaaataagaaagactaagggccgtatcgaaaagtgcggccctcagtctatttgtccgctttctttttctcggaacacatcgagcaggctccgttgaaccgtgcgtttggttcgatctctagggattgggtatatatatctcccttgataattgctgttgattttagaataagctttgcgcttacttttacggagccatctacctcaccgagaatctcagcattctcggatacgatattgcctgttacgctacctttggggccgataacgatcttgccgttgcaactgatgtccccttctacttttccatccaagcgaaagtctgtctctgtgataatattaccctttatcgttgtccccgcagccaaggcgttgtgtaatccgcctgcggaattttcatctttttgttttattcccatcataatgtgttgttacttggttgacaaatataagactatttttttgcaggaaggtttactttctatacatttacagataaattaaaagattatgacaacaaagattgaattacgaaggatgacattctatgcctatcatggcgtggcaccccaagagacccgggttgggaatacttttatcgtagatttgatactgacagcgccgttggagaatgcggtatggagcgacgatttaagcgatacgatcaattacgccacagtatatgaaaccgtgaaagcagaaatggctatcccctcgagacttcttgagcacgcggcggggcgtatcttgaaggctttgaaagagagatttccacagatcacggaggtggaacttgtcttgtctaaattaaatcctccgtttggcggagatattcatagtgcttcgataattcttaaagaaagctttctttctgtttagaaacttttatttaccttcgcgtttgtaaagaagtgatgcgatatacgatatactaaaagcacaaatacgataacattatggcatttaccaacaacgtaatgattgttcgtcacggattgctggcgaagttagtaaagctctggaaagaaaaccgtcttctagaagaaatagatcgcttaccgatcgagttgagtccccgaaaatcgaaagtgaggggccgttgctgtgtacataaggaacgtgccgtctggaaatacaagaccttgcctttgcttggttttgatatgcaggacgaggaagatgagttgacaccgctttcagagtatgcgaagcgtgccttgttccgctcggagaataagaaggaaaatatcatgtgtgtagtggatgaggcgtgttcctcttgtgtctccgtgaattatgagatcacgaatctttgccggggttgcgtggctcgtagttgttatatgaactgcccgaaggacgctatccgattcaagaaaaacggtcaggccgagattgatcatgaaacttgtatcagctgtggtaaatgccaccaaagctgtccgtaccatgccatcgtttatatcccgatcccttgcgaggaagtttgtccggttaaggcgatcagcaaggacaagtatggggtggagcatatcgacgagtctaaatgtatatattgcggtaaatgtgtgaatgcttgtccgttcggtgctatcttcgagatctcgcaagtattcgatatcttgcaacgcttgcggaataaggaacagatggtagcgattgtcgctccgtctatcttagctcagtttagcgctccgaaggaaaaagtgtatggcgctatcaagtccttgggattcgaggaagtggttgaggtggcgcaaggcgctatggaaaccacccgtcatgaggcggaagaattgatcgagaaattgaaagaaggacaaccgttcatgaccactagttgctgtccgtcttacgtgcaattggccgagaaacatatcccggatttaaagaaatacatctcttctactggatctccgatgtattatacggcccgtatcgtgaaggaaaaatatccggatgcgaagatcgtgtttgttggcccgtgcgtggcgaaacgaaaagaggtgaaactagatccgtgcgtggattttacacttacgtttgaggaagtaggttccgtattggagggattgggtatcaagatcgaggaggcccagcctttctctgtattatttaacgctgtccgtgaggcgcatggcttcgcccaaagtggtggtgtgatcaacgccgttaaggtttatttgaaggacgagaacgtaaatgccgtgcaggtagccaacctgacaaagaaaaatgtggcattattacgtgcttatgctaaaaccggaaaggctcccgcgcagtttatagaagtgatggcttgcgagggcggttgtgtgaccggtccttgtacgcacgccgataagactgccggacaaaagcagcttattaaggagcttactaaattctagacaaaatgattaaaaaattggttttatttgtctccttgacgggagtttttctatgtaccgcttcttgcggacataaagaattaccgtcaatgggagattattccgtacaggtatttaatgatacccacgtacgtttcgctccggatgtatatcccgccgcttttaacgctccgggaccggacagtatctatcatttggtgaatggccgtattatcttgaagaaggtaacattgccggaatataagcgaaacgtttccgtcaaactccgggttacggtagcttcgaatggagatcgctgggataaatccggctcttgttttgtattgccaaatgcctcgggcattaatttgttgaatatcgctaaaggggagaaggagtttcctgcggtggatagcgtgaaactggagaagatgatcggtatcatccccgggacggattatcaacctaccgtggaattgatgcgtttcatgactccgttcggagtagggcattacagtagtcccgaggatagcttgacgaaacatcgtaaacctgtgtatgtcgaccattgggaggatagcgtaagctgggagcaagacataaccgatttgtatcctcttctggaaggtggcgcttatgttgggatctttatcgatacatggacaccggaaggatacgtcgctagcatgacgatcgatgtggacgagtccgatctgacttgcgacgctttgccgaagaaacatgtagagccgttgatgaatacggtttattatatcgggcaggaatatccggatatattcgcccggaaggacgtgtcattggattttgatattcctcaaggcgcacgtgatgtccgtctgaaatatatcgttacgggacatggcggtcattccggtggtgatgagttcgtggagaaacagaatattgtatctgttgatggagttcctgtcttggattttgttccttggcgtacggactgcgcttctttccgtcgttttaatccggctaccggggtttggttgagaaagcgtctggctgcctatatcaccgagaagggttattcggagaaagaagtagaggaacccttggcgtcttcggatctttcccgctctaattggtgtcccggatcggacgtgataccggaagaggtggagctgaaggatatccaacccggccatcatacgctgacggtgagtattccggaagcggcagaagtggatgggaataagctgaatcattggttggtctcagcctatttggtctgggatgagtaaataatgtgataatatgttatgtaccaatgtgccaatcatgctctcttcaactaattggcatattggcacattagccaattaaaaaattattgatatggaagacttgttacctttcgccctattatgtttcacttcgttttttacgttgaccaatccactcggtacgatgccggttttcttgaccatgaccaatggtatgaatgaccatgagcggaaagcgattgtccgaagggccacgatcgtgtcgttcatcaccttgatggtttttactttctccggtcagttcctgtttaagttctttggtatctcctcgaacggctttcgcatagctggcggctttattatcttcaagattgggtttgatatgcttcaagcacgctactcgaacgcgaagttgaaagaggaagaggtgaaaacctatgcggatgatatatccattactcctctggcaatcccgatgttgtgcggtccgggagcgatcgccaacgcaatcatgcttatggatgacgcctcgacactcagcttaaagggtacgttgattggtattatcgcattggtttattttatcacgttcttgatcttacaagcttctacccgtttggtacggatattgggagagactggaaataacgtgatgatgcgtttgatgggattgatactgatggtgatcgccgtggaatgtttcgtaagcggattgaagcctatcttgatcgatatcttgcgtgaggcgatgggctaacaaattaccagaccagcttctttctgcgatgggcgctaaatattggaataaccttttttatcctcatcgcaatcggagatatttgctttccagataagtagctctgcttggaacgggagatacgatatgatatcatgggtgtgtgttgttccgtttgagatcgtgatcttcttggatttagcatacaggttcatatccttcattttttgctgtccttcaggtgtcgtatcatgaacttcttgtgtgaaatgaagtctgtttatttttaacatggctaggtgatcgattaattctttgagattatccttcgagatgagagtgaaaggtgtgtgtattgccacggtccgattgctgtatcgggggccatctagtatggtcattcccggtacgttccattgaatatctctacctgagttgggctgtttattgctggaggaagcagaaaacgtaaggtttgcgttgcgtaaaagaaacctttttgtccggatgcttttattagaatacaagagggggctatattcagtttataatgttcggccgctagttctttgtctgtgcggaatatgatattggctcgtttgtcttgtatttttatttccggggtgaatccggcggaaagcgtgaacagatcggtcaactcccgagcgatcatagcctgtttttcattttctacactgatgagggttgccttgttgaatgtgaaatcacctttgtctgatacactttgcaaggggaaaggaatgatctccggtttttcgtccggaaggaaacattttacaagtatcataaccaaaataataaaatatatacccgttgtacgtaacataagaataatttttaatgatatgcttttttgtttaatttttcacttgctgcaaatctatgctttaaggatattttcttgagtccaaaatcgtccgtgaaaattcaaaaaacgtttttttatactctgcaagccttatatttcggacgatttagtgtttttgccgaacaatgggtgatatacaactatgcgagtattttggaagtttttacaattatatctattgctgtttttagtgtgtttaacagagtctctttatgcagctcctaggtattattttaaacaaatctctttggaaaacggattatcgcagtcttccgtaaaatgtgtgctggtagatgaaagaggggttatgtggattggtacccgatttgggttgaatcgtttcgatagggaaaagattaccgtttatcaggaggagagggagaatccgcattctcttccttataatgatatagtttttttggaggaagatgcggagggaaatatttgggtaggaacctgttgcggattggcatatttcgatcgtggtactttccggaacctgcttttgagtcttcttccggtaatatttatatttctggagtggaagggctggttaggatacggcccggctatgacattcatgaggaagaggatttttctgtgagcatgattaatttggctttagatgggttaccgattcatcctgatggtatatccggggaacaggctatttccattccgtgggattatgtttcccttgggaggggtataaatcaggggcggatatctatttggcgaagccgtttgatatagattccttgttggtgattctgcggaatatattaagacaacgagacctacttcgtgtgcgttatcgtgagtccggttgtctattctctccaaaagaggatgcgacaagcaatgcggacgaacaattcatgtgtaaattgaatacgttgcttcgggagaacttgagtaatccggatttgaatgtgccttttatcgcctctgcgatggcgatgagtagaacgacgctttatagcaagttcagtcatttgtcggatgtctcggttggtgattatgtgattcggtttcgtatggtcgaggcttctcggttgctttcatctcataaggatatgagtattcaggaagtagcggaccgtgtcggtttttccagcgctcgttattttagtacggcttttaaacaaagctatggggtcactccaaccgaatatcgtcgaaataattaagtgttagttgcagactattcttttcataaattcaatctttttagcagaatctgatagatatctcctataaacaactttttgggtgagtcatatgttttaaatagctcctgaatgaggacattatgatagattttctatgataattattattgtctacctattgacatttcgggttggctagtgtaaaattggcttaaaaaagtatggctacaataaaagtaaagtttcgtccatcgacggtgagaggcaaagcgggtgttgtctgctaccaactttgtcacagacaggagaataggcaaataactaccgatatgcggatatttcctcattggtggaatggggagaaacgagagttggttgttacgcctgacaatgaaaaaactattttttcttatcagaaacgaataaatgcggacttagttgcgatccggaaaatcattcgggaattagatgctgtaggggatgaatacaccttatccgatgtgatcaggagatttcgatctccaaaaactgaaaccggaatgttggactatttgagaaaagagattggactccttcatgatagcggtcaattcagtacttcccgtaattatttacgaacattgaacagcttctcctcttttttagagaattgtgatatacctctcaccgcattagactccgatacggcttgcaaatatgagaaatggctatggggaaggagagtgagtaagaatagtagctcattttatatgagaatcttgcgtgccgcttataataaagctgtacaagagcaacttgtggagcaagcttttccttttcatgaggtatataccgggatcgccaagacatcgaaacgtgccgttagtgaaaagaccattttgaagttgcagagacttgacctgtcttattcatcggctttggctctctctcgggatttgtttgtattcagctatagtactcgagggatggcgtttgtggatatggcttatttgaaaaaagaaaatataggtaaaggggtaattacttactgtcgccataagaccggtcaaaacctgacgttgcgaattgaaccttgtatagaggcgatcttgagacgatatctatcggactcttcgaaaactccctatgtatttccaatcattaccgatgaaaatccggatcgggcttacttgcaataccaaacgggattgaattaccataatcagaaattaaagcgattggggaagttaatcggtgagacattgcctctatcttcatacactccccgccatagttgggctaccgctgcacgcaatcataatatccctgttgcggttatcagcgcaggaatgggacatacctccgagaagacaactcttatttatttggactctttggataactcgttgatagacaatgcgaataatggaattttaaaagacctaaattctactgtctcttggtaagaaatcttagaaatacgtcgcaaatgtaattataatctgcaaaacaaaaaaataaaggggggatttttggatataaattgtatcctctgttgatgtaactcgttaacaaatagcatatataaatacgttaattgttttcttctctattattctttgtctggtctggaaaatgagagtgtatacttttttcgacaacaaccttatcttttttcgagtatcaaattgagtaaaccgagtaaaaaagtagtttttatatattttatgtatttgataataagataaataactatttgtactgtttcttaccaagaaacggtagaaatatagggttagggtttcccattcactgtagtcaggaatggtcctcatttcggaattttatataaaaatagccggattaaccttgattgctgtatatcctttaatcaaaaaataaggaaatacaggaatggaaggtatatcctctttgtacatgaataaaaacggtataattcattgaaaacaataacacttgacggcaaccattggtttgcgctaaaagtattttataacaaagtttttgagatcgaggaatccctcaagaaggatgatatcgattgctatttcccttgtgaggatgcggtggtcatgcggaatggagtaagaaagatcatacgtaaaccaattatcagttcaatcctgttctttcattctacgacgttgcgtgcgatggagatacagcgacaattcacggacaaggtgatactgtatacaagagataaggaattgaaaaaggtgccacttatcattccggaccgggagatgaatattttcatgttggtcacgtcatccggcgagaaaggaatggaatatttgggggctgacagtaccaagttttgtcggggagaacgtgtgagagtgattgacgggaaattcaagggggcggaaggatatatctgccggatcaagaaaaacagccgtttggttgtcgccattcagggggtctgtgccgtagcgacctcctatatcccacaaagctttattcaaaaaatatgagaacgataatagagaccggtctttttttatcgggtggttttttgatatccattttacagggattgatacttatccccaatatcttgttgatctcctataagaaacgattgttcgatcagcccgacgagcgtaaggtgcattccatacctgttccccgcttgggaggtatctctttcttcccggcgatactcgtgtcgctctgtttgataatcggtctgttccattgcgttgggattccgatagctcgtttgctaaccgatcgaagtttgttggagttactgttttgggtcagtggttgtatgctactttatctcattggtgtggcagatgatctggtgggtgtcggttatcgttacaaatttgttgttcaggtttttacggcgatcctattggtgttgccgggggcatggattaactcgttaggcggtttgttcggaatttatatgcttccttcgtgggtgggtattcctttgacggttttgatagtcgtttatataaccaacgctattaacctgattgacggtatagacggcttggcttccggcttgagttgtatcgcgcttaccgtattggcggctatctgtatatctaacggatcttatttttatgcattgttggcgttagctacattaggtatattgatacttttctggttctataacgtttttggcaacgctcagcgtgggcacaaacttttcatgggggatacaggaagcttgacgatcggttatatcctcagcttcttggtaatacaactaagtgtcgtacattcagatggggaggtccggacaaacccttatatggttatagcattctcgacgctcctggttcctcttcttgatgtcttccgtgtggtgttgcatcgattacgtaaaggcaggaatcccttcttaccggataagaatcacatccatcataagttgttgcggactggtatgcgtgtccgtacggtattggtgacggtcctgttaatctccttctttttcatagggatgaatatcctgctgtccccggttttaaatcttacttggttattggtactaaatatgttgttgtgggcattgatacatcttatcatcaaccggtgcatcatcctttatcaggaaaaagagtggcatcaatgaaatcaaatcaattaattttatatcatgaataagagttctcgttattcacatgtgtttttcatacaattggtagggttgttatttcttttaagcgcctgttccactacgcaccaaacgaattattttcaagatcttcaccccggagagagtgagcagaaggtcgtgtctccattgacggtcaagatacgaccgggcgatcagatctctattctggtgaatagccgagatccccaactgaccaacctatttaatttgccgatcctgtcgcagcaggtcggacaggtatcgcaaggtagtggatcaagtcgtggcttgtccggctatacggtagacgatcggggtgagattgattttcctgtattgggaaaaatccatgtggcggggaaaagccggtctgagatagcggcctttatcaaggatgcgttgattacagggaattacgtaaaagatccggtggtgaccgttgaatttatgaaccttacaatatcggttctgggtgaggtgaacaacccggggcgtttcaatatcgaccgggatcaaatgaccttgttagacgctatcagtatggcgggcgatttgacgatttatggcaaacgggataaggtaatggtactacgtgaggaaaatggagcgcaacgagtttacggcatagacctttgctccgccagccagatgtatgcgtctcccgcctataacctccagcagaatgacgtgatttatgtggagccgaataccgtgcgggcacgtcagtccactgtcaacggaaacaatgttcgttccacctccttttggatatcgctggcttccttgttgacaacgattagcgtacttgtattcaaataataattgatcattcaattcattcattaaaaaattatggctcaaaataacgttagaacgggtcaaccggaggacttcatgcggattcaggacttgttttacctctgtctctccaagtggtattggtttgtcatctctttggggataacgctaagtgtcgctattctttatgtattggttactcctccggtttatatgcggtcggcggctttgttgatcaaggacgagtcgaaggggcaatctctttccggcgaggtgggaggctctttttccgatctggggctttttcaggcgaacaccaatgtgaacaatgagttgatatccttgcaatctcctgcgattatgctggatgtcgtgaatcgattgcgtttggatgttgcctatcatacggatggggctttttatcgcaaagtcctttatggacaggatcttccggtctctgtttcatttgcggatttgcaagataatgaatccgtgtcttttaccttacgtttgctggatgaggagaacgtggaactatccgatttcattcgggagggtgaggagcttgaagagacctcggtcatgacctgtaagttacgggagttggttacgactccggtgggtaaactgacgatagatccgaccccttattttcaaggagcgttcgctcagccgatttatgtctcgcgatccggtctgtatggcacgttatccgcctattccggtaatttgagcgtagcgttaagcgacgagaaatcaacggtgatcaacctctcgattaaggatgtcagtgtgcggcgtgcggaagacatattgaataccttgatatccgtctataatgagaattgggtaaaagacaagaaccagatcgccatcagtacctccatgtttatcaatgatcgtttgggtgtgattgagggggagttggggagcgtggatgagaatatctctacttataaaagcgagaatctgctgccggatgtgcaagcggcctccagtttgtatctggcgcaatccagcgagaccaattcccgcatccttactttgaacactcagttatccatggcccgttatatccggaactacttgacgaacgcttccagcaagaaccagttgctaccggctaactccggtttggaaagcaccaatatagaacatcagatatcagaatacaatacgacgcagttgcaacgtaacaatttagtggcgaacagtagcgagcgaaatccgttggtgatggatctggatcattccttgcaggccatgcgtacggctatcatctcgtccattgataatctggtagtcacgcttaatacgcaaattagtactttgcgacaaagcgagaagcaaaccacggcccgtatcgccgctaatccctcgcaagcgaaatacctgttatcagtggaacgtcagcaaaaggtaaaagagtcattgtatttattcctgttgcagaaacgtgaggagaatgagttgtcccaagcttttacggcatataatacacggttgatcaccccgccgacgggaaatatgcttcctatagccccggttaagaagaatatcttattggtagcttttgcgctcggcttgttaataccggtcgtgatcctgtttatgttggagaatatgaatacgactattcgcgggcgaaaagatatagagcgattgaccattccattcgttggagagatacctttgtcatatcgggcgaaaaaaggctttttccggcgtaagaaagaggaaaaggccataatcgtagtcaaggaaaaaagccgcaacgtaatcaatgaggcattccgggtagtacgtaccaatttagagttcatgatgggaaaagacgctcactcaaaggttatcatggtatcttccttgaatcccggtagcggtaagacctttataacgatgaatctctccacgagtctcgccgtaaaaagtaaaaaagttctggcgatagatatggaccttcgtcgagcatcccttagcgattatatccattctccaaagtgtggcatatccgattacctaagcggacaggttccggattatagctctattatcgtaaagggagaaactatcgccggtttggatgtgattcccgtaggtacgatccccccaaaccctacggaacttttattctcggaacgttttgccacattgctggaacagctccgtatggagtatgattatatctttatcgattgtccgccggtcgagatcgtggccgatgcttccattatcaataagtactcagacttgaccttgtttatcatccgtgcgggattacttgaccgaaacctgttagtggatgtcgagaagttccatacggaacgtaaatacggcaacatgtctttgatcttaaatggaacagacggaggaggtaaccgttatggctaccattacggctacgccggatatacgaaagaggaataaataggatgtggtttttcaaaaagcagaccagtcttgtgggaagcggtattttggagggatttactgattaccattcacatatattacccggggtggatgatggtatacggacgttgggtgaatctttggatacgttggattgtttggagaaactaggagttaaatctatttggcttactccccatgtcatggaagacattcccaacacgagcgagaaattgagagaacgtttccagcttcttcttcaatattattccggaggtatagctctccatttagccgcggaatacatgttggataacttatttgaggagcgactggcctcggaagacttgttgccgattggcaaggctcaaaaacatttgctagtggagacttcctattttaatcctccgatgggattaaataatattctgcttcggatcaaggcaaaaggctatatacctgtactggcgcatcccgaacgatatacctatatgaatgagaaagattattggcgattgaaaggtatgaacgtgaggttccaattgaatctcctttccttgatcggtgcatatggtccggaggttcgaggtaaggcggagtggctactgaaaaacggctattatcaactctgtggaactgatattcatagccttacgctttggaaagaaagtgttatgaagaaaagaatatcgggaaatgtctctcgaatgttgcaaggcatcatagcgacacatttcccgggatagttaatggaacaagtaacgatattcatcgcacgagaagcagggacaagctttctttacgccgggcaagtcacgatgccccacgataaacgcatgaggaaagagcgtgtggagtttccacaggagttccctcaatcgctccttctgttccggggtacgggtatcggcggttttgccgctttcatccaatccgccttcataacaaatacctatgctgcaacgattgagtccacggacatgggcacctacttccagcagtcggcgatgctgtgtcacgattccactcctgcggatatagaaatgatagccgatggtacggaatccccgtaccttatggtcacggtgaagctgttccaccgtatagtcacggtcactttgggtagcggagcaatgtatgacgatgaagcggacagagtccgccccattcatcatcaatccgctttccacttgcgtcagcagggtacgctcgttgagcgtctcttctccgccgacaatcatgggaaatgtttcttgcgtcattgtcactagaatttagaagtgagaaacacaggaagatacacctaatgccgttaaggctgcgataatagcctgtacgatagcttggactattttcttccaatcgattttacttgaattgctcatgtctgttcaaatttgagggtgaataatgtatagttcttggagatcagatctcgtcgggactttcggagtccccttcctcgggagttacgataggtaccccacccttaaagtcgattctcaccaaattggttttctcgggcaggagcgcataacggaacgtcccgttaaggatcgtatactcggcgttaaacgctggtcggatacttttcaccagcttggctgtcacctccttgggtgtgcttacgcttttctcggtgagcaactcgttgtagaagatgcccaatccgtccagcttgatcttgtaaccaagcgccatgtgggtttggcagaaataagcgagacgttcgatgaccccgatcacgtcggccggtgtcaaggccgactcttgtgcgatctgggtagccacctgcttggtagtgattgtaccataataataagcttgagcactgtaaacagtttctcccttacgagggccaatgttcaaatcgatttttctagcataaaaaggctgtgccataatgttaaaattttaatagtgaatactctgttatttttatcaatgtcattgactgatacaaaagtaaggaagtcgaaaacctcactttccgatgctttcggtttcattccggttgtttcgtttaaggcgtttccgaagtgaataactaatggcttgtcaagtgaataactagcggctatacctagtgaataactaacggcttcagttcccgcttacggttcaccgagatactgtacgatgatgcctgtctgtttaggcgtaaacgttttgttgtgaggcttatagtacgcttttttcaactcggtgatcaggtcggggttatgcttcatcaggttacggaggtttgcgatggcagattcctcgttatttgtatcaggaaaatagagcttcgccaactcccttttggagtaggggcggatgcggaaattcggttcgttcatataataaaaagtttttttaatgaatactttagattgctttctcattcgaatgatattgcgaagctaccggagcgaagacattaaaccatgaataaataaaagcattcggttatgattccgtgcctattcggaaatccgggaaataaataaagaaatgagagttgaggaaaaaaagacatttaccaatatacaattgagcgatgaagaatggtctctataccgatatatccccaatgtggagagattaaagtattatgtcggacgtatgagaaactgcatgaatatggatcatgtgatggatcacgtcgtgctccccatgttgctgcatgagctggaagtcaccaaggaaaattcagagaagagagacttctacacccgattacgcccattcatcaagcacttacgcggctcgtccggcacgacgctgtttgagcgtatcactcgattgaacgagatactgaaaagggagaaacggtgcggacaaacattcgccggcatccttcaacaaatcaagatagagcccccaaagcttggcgaggaagcctcctgcatcatcgaactgatcataagctcctctcccgagaatggtaatgtgataagcgtgagccctatccttgtaggagtagagtatagaaagaaagtcaaccagagcatcggtagggaaatcggcgtgaatgtatctggccgatctttacaggatcgtatataatataattacaatttttaacaatagggaatgaaagcatgttttatgggcttgggttatattggtttgcccacagccattatcgctgccaagcacggcattcagataacgggagttgatatcaatccccatgtagtggaaatgactaatgcgggacatctacacatcattgaacctggtatggagaaaatgttacaggaagtagtgaaaactggcatgttgaaggcttcggttacaccagaagtaagtgatgcttattttatggtagttcctacccctttcaagggaaaccatgaacctgatgtgagttacgtggaagctgctactcatgcggtattgccgttgctgaaagaaggggatctttatgtaatagaatccacttcacccgtaggaaccacagaggccatggcacgcatcatctttaatgaacgtccggaactggaaggtaagatttatattgcctattgtccggagcgcgtattacccggtaatgtgatttatgaattggtacataatgaccgtgtcataggcggtttaaatcctgaatctaccgataaggcctttgagttctattcccaatttgtacaaggtacgcttcacaaaacgaactgtcgcacggcagaaatgtgcaaactgacggagaactctagtcgcgatgtacaaattgcttttgccaatgagctttcgcttatctgcgacaaggcgggcatcaatgtttgggagcttgtcaatcttgccaacaagcatccgcgtgtgaatatcctgcaacccggttgcggtgttgggggacattgcattgcggtggatccatactttatcactgctgatttccctgcggaaagtaagttgattagtgatgcccgtgaaattaacaactacaagagtttctggtgtgccgagaaagtgaagaatgccatgttggagtttgaattgaaacatcatcgcaaaccttgtgtcgctatgatgggacttgctttcaaacccaatatcgacgatttgcgtgaaagcccggcaaaatacatcactacgaaagtgatgcagagttgcaataatgccgatattttggttgtggaaccgaatataaaaaaacacaatgtctttaaattgactgattataaagaggcttatgacaaagcagatatcgtggtgtttttgacggcacacattccatttagagaactggaatggaggggcgataaggtgacattggatttttgtggagtgtttaagaaataagatggagaattaaaatatgaataagattttggttactggaggagccgggtttattggttctaatctttgtgagcatttgttggctcacaactatgaagtggtatgtttagacaattttgccaccggtaagccagagaatgtgttcccgcttttagaacgctattctgaaaagtttaaattgatagtcggtgatatccgggttttggcagattgtcgcaaagcagtggagggtgtggattacgttatgcacgaagccgcattgggaagcgtacctcgttctatcaaagatccgattactacgaacgacaccaatatatccggattcttgaatatgctggtaaccgcccgagatgcaggtgtgaaacgatttatatatgctgcaagttcgtctacttatggcgacagcaagtcactaccgaaggtcgaggatgtgataggaaagccactatctccttatgccattaccaagtatgtgaacgaactctatgccgatgtgtttgccaaaacatacggtatggaatgcatcggactgcgctatttcaatgtgttcgggcgtcgtcaggatccgtttggcgcatacgccgttgtgattccattgtttgtgaagaaactgatggctcatgaaagtccggttattaatggtgatggtgaatacagccgcgatttcacttatatagacaatgtggttcagatgaatatgctggctatgaccaccaataataagaatgctgtaaatcagatatataacacagcctacggtgaacgcaccacattgaaccaacttgtaggctatctgaaagaatttttgagcgagtttgattctgagattattcaagtggaagtgattcatggtcctaaccgtttaggagatataccccattctctggcttgtattgacaaagccaaatcgttattgggctataatccgcaatacagtatgcgcgaggggttgaaagaagctgtgaaatggtattggaataatttgatataaaaatgaaaagtattaagatttgtgtagtcggattaggatatgtaggcttaccgcttgcccgacttttttcaactaaatatcctactgtgggatttgatatgaatcaagctcgtgtgaatgctttgatgaaggggcatgatgcaacacttgaagttgctgatgacctacttcaggatgccattaacaatcatgggtttaaatgtacaacagatattgaacaaattcgcgactgtaatttctacatcgtagcagttccaactcctgtggatgagaacaacaatccggatttaactccactttatggtgcaagtaccactgttggaaaggtgatttccaaaggagatattgtagtctatgagtctactgtttatcccggtgttacagaagatgagtgtattccagttgtggaaaaagtgtccggattgaagtataatgaagatttctttgcaggctatagccctgaacgtataaatccgggagataaacttcatacagttgaaaaaatcaagaaagttacttctggttccacagttgaaatcggtaagaaagtgaatgaagtttatgcgtccgtcattacagctggtacccaccttgcttcaactatcaaggtggcagaagccgctaaagttatcgaaaactcgcagcgtgatataaacatcgcttttgtcaacgaactttccaaaattttcactaagatgggaattgacacgcaggatgtgcttgaggcagcttccacaaagtggaattttcttccattcaagccgggacttgtaggcggacattgcataggtgtcgatccttattatctcgctcagtgtgcgcagcgtcacggatacaaccctgaaatcattcttgccggtcgacgtatgaatgatggcatgggagaatatgtagccaacgaagtagtgaaacttatgttgaaaaaaggtattcaggtgttgggggcaaacatcttgatattaggttttacattcaaggaaaactgtcctgatgtgcgcaacacaaaggttattgatatttataatgctctacgagagtataatgttaatataacaatttatgatccatgggcaaatccggcaatcgtagaacacgaatatggaataaaagtaacgaatcaacttccaatgaaaaagtatgacactgcaattcttgccgttgctcacaaggaatttacggagttagatatattgtcaatgcttaacgacaatcatataatttatgatgtcaaaggattccttgacaaacaaatagtgaatggtcgattgtaatttaaattaaatgcattaatgaagagatttactttgtggaatagctatgttgcaataactgaaagtaaagagtttgttgattggaacaaaacaaaaattataggcagttttaaatgtccggctttttcctatagatcaagtactcagataaaagcagacccttttttatttgagtataacaacgctatatatctcttctacgaagaaaagtataaaaacgggaaaggttatattgtctgtacttggacatcggatttaaaaaactggtctcaaccggttgtagtattgaaggaaccatttcatttgtcattcccttatgtatttaagataaatgataaaatttatatgcttccggaaagtaatgaatcaaatgagttgaggttatatgagtgtgttgacttcccatataaatggaaattaaacaaaattatctttgataatggaaaatatgtagactcatctattatttgcaagggcgacatctactatttgtttactacacataaaactgaaaactctttttatcatgaattatattactgcaatgatttattaagcgataagtggataaaacatccgcaatctccaatctcgaataatcctaaatttgctcgtaacggaggctccgttttttcgcataataacaatctgttccgtcctgctcaagattgctcggtatcctacgggaataatttgtcgatatttaatgtaacacatttatctattgataaatatgaagaaacgcttgttgcgactaatttctttcctaaatataaattcaaacacggaggacatcacttttcgcatatcgaatataaaggtcaaaatataatagcttttgataaaaaatcaagagaatatgcgataactccactgttttcttcgctttatgctttaatttgtagactgatgaagattacatctcataaatagttcaaacaactacagatttaaacgatataatatgaatagagaagtagtagttataggtggcaatcatcacaatactttatcaatacttagaagcttaggtgaaaaaggtataaagtcgttgttaattgttttatctccatacgatcctaaaccatttgtaggttatagtaaatatattcagaagaagatagtagtgacaaatataaatgaaatttcatcggctatgtattctcttcacacgacagcagaaaaagctattgttatagcctgtaatgattgcatttccagttatctcgatatgaaccacaataatctttccaaagattttgtactcccgggctcaaaggatgaaggaatgataactcacttcatggacaaaggtgcaatggcacaacttgctgtaaaaagcggactaaatattccaaaatcaattatcatttcgacggcaaatcctgaatttgaatcgattacttacccatgtatcagtaaacctcttgtaagcaaaaacggctcaaaatcggatattgttatttgtgaggacgaaagtgcgttaagaaaatatttaaatcattgcagatgcgataaaataataattcaggagtatatctcaaaagatattgaatttcagcttattggctgttctattaaggaaggggataaaataattattccgggagtatcaataatacttcgtcaacctatgaacggcaacacgggatttttgcgatatttcccaattaaagagtttacctacgataaatcttcttgttttgagtttatacgaagcacaggttattcaggactttttagtgttgaatttattcgggataagaatggtactgattactttatggaaataaatttccgcaatgatgggaactcgatatgtgttacagcttccggtatgaatcttccatatatatggtatctttataattgcggtgaaaacatagaaagtgaattatgttatgattcaatgagagaggtacttgtgatgccggaatttcaagattttaaaaatgtcaaacatagacagatcagcctgagtaattggcttaaagatgttaagaaaacagatcggtttatggtgtttagcaagcacgaccaaaaaccattttggatggttgttttcaagcaattttttcattaaataggtagctaagcactatctgatgtcaaccatcgcattataataaaaataacacgttaatttaagatagatttatattgtcaaagactgattcagatgccaggggaaatttccgatggctttaattcttatttgattataatatagtttgcaaaaattaatacaatgaattacaattcactaagagttttcaataaagtaaatcaactttgtaggaattggagaagccaattatattctctttttgtttttggctcaagcaaatatatttacaaaggaaaaaacgttcacatttatgggtttaaaacactgtcaatagggaaagcttgccatataatggataattctgatatacgaggaaatgtaaatatcgggaacaatgtttttattcatgaaaatgtattaattagatccatggagtgttctatatcaatcggaaataatacgactgtaaatcgaaatactaacatattggcacaagtaacaataggttcaaatgtgtccatagctccgaatgttgtaatagtaggaatgaatcatgtattttcgaatcttgatgatacaattaaatctcaaggtagcacatccaaagggattatcattgaagatgatgtgtggatagcaacaaatgtttccattcttgatggtattacaattgggaaaggttctgttattgcagcaggtgcagttgtaaataaagatgttccaccttattcagtaatggcgggtgtaccggcaaaagttgtcaagcaaaggaatgggtaatacaaagcattacatttggtctgcggttgataaattcggtacgcaaattataagttttgtcagcaatatccttattgcaaggatattgtctcccgatgactatggtttggtggctatgcttgccatattcacaacaatcgtcatgagccttagtgatgcaggattcaatgacggacttattcgcaaatcagattgcgataaaaaagattttggaacaattgcatcgtataatcttgcagttgccttatttatgtttgcagtaatgaacattgccgcaccatatattgctatttttttcggacgcaatgaattgacaaacatagctagggttcttgccataggatttatattaaaagccattacattaactggatttgttcaacttgtaaagcaattaaaattcaaacaattgtcgcaaatcaatatcatttgttcgctattgtcattcgtagtggtttatacgttagcgattataggatttggatattgggctttggcattgcaacctgttgttattgcaatattcaatattatattgttgcttatcattggaaaatggaaaccttatttctgtttttacaaaaaacgattcaaagaaatgtttgcttatagttccaatcttcttttgtcgtatattataaatcgaataggagaaaatatttatagcgtcattattggtaaatcattttcctcgtcttcgttggggttttataatcaggcacataaaatgcaaacagttccaagcgaagctattcgaagtataataatgactgcaagttatccgataatcgcaaacgaaaagaatccgaataaaagatatgatttatacttatcggtattcagtaagtttacctttatcgtatcggcaatggtgtttttactaatggctgtatctgattttgccttttatgcattattgggagaaaaatggatacctgcagcacctctgttctcaatttttatactaatcacactaacgttccctcaaaaagtagttaatgcgaatatcattaaaattcaaggagattcggcgttatataggaatttgtccttgcttgacacggtattaagaataatagcactgcttgtaaccatgacctactctttggaaatgattgtagttgggcaagtggtagctgctttcatttcagcctacacttacactgcgtgttgtggaaagaggataggtttttctacaaagaaacagtatcgaatatggtattcgattgtgtggaagccattagcggcattttttgttagcaaggtgattttgtcattcttcaaaatgggttactggggcgatatgttcagtgctgtgtttttcttagtggttttatgttcgctatgcgaactaacaaaagaccatacatatatcaacctgaaaacaatttatataacatatttgaaaaagctgtgcaaataagatgaatataaaaagagttatacgatctcgaataaggaattgggaattgcacctgtcaaaaacttctaagaaaagatatataaattatctaaggaaacagggtgttaagattggagaaaacatttggatgaccccttgtattaaaactgtaaatatagacattacaagaccatctcttgttgaaatcggagattatgtccgtattgataggaattttaccttgcttactcatgatgcgggattttatgttttactcaacaaatggcatgaattcattccccaatcaggaaaagtaaagattggaaataatgtatattttgcgagaaattgtactgttttcaaaggggtaacaatcggtgataactgtattattggttttggctctgttgtgactcatgatattccggctaatagtgttgctgttggtgtaccagcacgtgtagttggaactgtggaggattattacaaaaaaagaagtacgaaatgtataagtgaagcattggcttatgcaaaaagtatagaggaaagatttcatcggaaaccgcgattggatgaattttgggaagaatttccattgttcgtagataaagagaatatgcatttgtacccccatttaccttataaacgtcagttaagagatagctttgattattgggttgaacatcataagagaatttatgatggttttgaagaattcttaaaggctgccgggatagaatgaaaaaaatagctatattatatcctgctcattatgagcaatcaagcggaggggcagaaatacagatactctatttgattaatgcttgcaagcagcagaactgggagattcattatatctttgaagataagggaacagatataaaaaataaggagaacatcgtgctgcatcccttatgcaagatgaagaattataaattctgtggaaaagggtggttcctatatgaaaaacagatactaagagaattaaatgcgatcaaaccggatacgatatatacgagaatcggttcctcatggataggtatagctacctcgtatgcaaaaaaccataaagttaagcatgctcacgctttagcatctgatagctcggtaacacgaaaattattgggaaagccattatatccattattcagtcaaatcgaaacctattacataaataaaggtttggtaggtgcagatgtgattatcgctcagaacgtttttcaacaacaaatgttaagtaagcgttatgggaaagaatcaattttagtaaaccaaatgacaccatctgttgatgaatcatgtttgcaaaaaaaatacaataagataaagattatctgggttgcaaattttaaagagttgaaacatccggaattgtttgttcaattagcaaaggatttaaaaggtcattcggatagaatcgaaatgtatatgtgtggaagatccacttctaaatacaataatcttttacaggatctgaatcatatagattatttaaattatctgggaagtcttgatcaagaacaggtttttgatttgatgaatgaagcacatattttagtgaacacaagtgaatatgagggcttctcaaatacatttgttcaagcatggatgcgtaaagttgtcgttgtcagtatgaattctaatcccagcgatattctcactagtcaaggaattggtttcctaactcccaacatgacaaatttggtagcaaccattcataagttgattgaacaccctgaaataatatcggaattgggtgaaaaatcttaccaatatgcgttggaaaatcatgatttaaacaaaaacatgaaaaaaataattgaagtgttatgaatgcaatccattggtttgaagcaaagcaacttgacagagttactaattattcttcaagaacagaatgtataaaaaatgtattagattttgatggcgaattatattactattgttctttttcggagaaaaaagagtattatagctttgacaagaatattgtttacttaggccgaataaaaaataaattcctcaaatttctcgaatttcgtctattgataatattcaagacccttcaacttgttgtgggttcagactcaaatgtcttgatgtgtaatcaggacttggtaaaatacctgaaaccagcaatttttctaaataagttattagggaaaaataataagtttgtattggatgtacggacactacccactgtacctgaaacttttgaaaaggatatggttcaatatcaacgtcagataaaacacgcatgtaaatcctttgacggattaagttttataactccattccttgaaaaagtgtctttatcgggtaataatggtgagattcctacagttaattggagttcgggtgtcaatatagatttatttgatgctgatagatatgattatacaagagataccaaagctttcagaatcttttatcatggcggcatatctcactcccgagggaatatggatttgatcaaagcgtgcgaaatcatagctcaaaagggctattcaattgagttggtccaaatagggaaaatagtggacaaagatttgaaaacctatatttcgaaaaaaggaatcggacattggtgtaagttatgtgatgccaaacctttatctgatatgccagcaatggtggcacgttgtgatttaccagttcttccctttcccaattttatggcatggagggtgtcaagtcctataaaacttatggagtatctggcaatggggaaaccggtgcttgcacctgacatggaatgttttacagatattctggataaaaacagcgatatggtatactattatgatatgaataatgagcacgttgttgaggagattgctaatgctattatccatatcatagagcaacgcgacaatacaaatgctttcatcaaaaatcaagtgtgtatcgattatgtaaaagaaaaatttacatggaaagcacaagtacaccatctttataaattttgcaataaactatgccagtaaatcgagtaaagctttattttttgtatgcaatactctttcttgtttttacgcaaggattttgggaacgatataccccaattcctgctcaacctatattggagatactcattataggaataacactattgtcttataaaaatatcttaaaccctctttgttataaattgctatttgtgttgtcagtagggtttatatgttcaatatataccgcttcatcaattgcttattttaagagcatcaggtttgtcttgtattttttcttcttgtatgatatttacagaagtactcattttgaaatttatcagtacctccgcttattgaaatttctaatgggacttgttatcttgcaaggagttgcttctattattcagatatttatcataggagaacgaattgagggatacgtcggttatatgtccagtttaggtggatcaacagccacaacattcttggtgcttgtactgtcaatatgtatggtgattctgctgtattcaaacaataaactttcaagaaaatatatttatgagatattgctgtgtatagcctctgcaatattggtgggatattcaagcggtaagcgcacaatctatttcattgctcctgttacacttgtactgtctgttttttttacgcgtatctatattcgtcgcgatcgcttgatggaacttcgaaaaaaggtaagatatatagtcattggaactgtcatattatttcctatatacataataggggcaacttcaacacagtttaaattaaatgatcggataaaaacaagtggtgatagaatggaaattctgtcaggtatgatagagtatgctatgttttacgagaatagtgaacacaatggaagttctaccggtcggtcagggacgactaaaaatatagtaaaatcagcattaaacgatgccaaatatttttttgttggttccggatttggttcctataaagacgaggaggctacaaaagaaagaaatgtaatatatggtatcgtcggttttacacgtgatgttttctctggggggatgatatttgctgtgcttatgtctttatggcttataaaagtcattctgtatcatgacaaaacagaacaagacccattttccatcactttaagatatatgattctattttcgttcttatttacccatttcgcctattctgctgattatgttactcatctaaaattgacatcattattgatagtcatattacccatcatcaatacaaaagaatacgagcatataaaagaacatctttgggcatacctaaaatagcaatatacttatgaatataacatcttctataaaagagaaaatacggttatatgggttttggggtatgatgcagcgtgtctttaaaagcatcatatatgccgtttttaagatcaaatgggaaaaatgttacttgatgtctcgaacagttgaaaagattgactattcactttcagagaaaggtatagaggttcgtgaacttaaaatggaagattatgataacgagctatggatcacttatctaacagaagaaaaaaaagatacgttacaaaaaagattcaagacaaaaaacacgaaaggatacggggtgtttgttaatggggttttagcctgtagtgcatggatttcattcggaattattgcatataatgaagataccatattgtttaaaaacgacaaggccgcattattatttgatgcttacacacattcgtattttagagggaacggttatcataattatatgatcaaatggcgtctaaatgaattaaaacacaacaagatagaaaaagcttatacaatagtcttttcttacaataagccctctatggttaatcaaagaaaatgccgttttgatatagatcaaatattttatgtgtttaaaataggctccaaaatatatctcagtaaatattccaataaataataacaatgataatagacaaagatactttttttcaaatcgttgagaagtttgaatatattccttttgaacaaactttggcatgggagaattataaagatgaaagtggctctcacttcattcattttgtggatgataaatcagctccaaatatatgttgctgggggagaattataaagaaaccattggttggaaaaatattggatattcaaggtgaaataaagcaaacagcgattacgaataagcagattcaacatttttggaaaaatgtgatagaggaagcatcatgcaatatgattacttacaatagtgtaagcgaatattcgtgtaattatgaaatatcaatgcgcagggcgggttttatacgcccattaggaaatcgtgtatgtcctttgactatattcattcagactcaggaagaccgtgatacagatcgaaactggcgcagaaatttgaagaaaagtttatcagaaaatctcgtgtttaaggctattgaccaaccgacattagaaaatgcacaggaaataagtcgcatgtttggagaactcaaagagatgaaaggactgggatatgatcttgttcccaatcaactgatgcagattctaaaagacgacaatttcaaattattctatactttaaaagatgatattcctctttgcgccagaattgtgtacataaaaaacggaatggctgccgatgtgtttgctgccaattccttcgaatcaagaaaatattcagcaacccattttatgatggagcggatttttgatcatctaaaagaacaaggaatcaaggtctttgatttttcaaggattccgccaagtaacaatgagacagattctgtatacgtctttaaaaatagtgcaggaggatacccagtacaatataatggagagtggatttggagtaaaaaaagaatctattccctagcattttgtgtttacaatttcttcatacgaaaagctcatcaatactaacagagagaaaaatgaacaaacgagaaatagtcggatatgcgctttatcaaataggtaaattcggcaggaaagaacccgattttttatcgatatattttcacgacccagctccaaaaacgttcacatccatcttggagtggtgtaaaaagaaaagttaccgttttataactctccaagagtgttatgctattttgtcgggtaaaattaggcaagaggggaaagttgcttacctttcgtttgacgatgggtggcaatcgaatttgaatcttattccgattatcgacaaatatcaagcaccaatcacgatattcgtttctatcgatcctctgctttccggtaatttttggtgggaatatgcgcttgcagatggaattgagttaaggaataaaatgaaattgatgagttataaaaaattcgtttcatcattggaatccttaaaaaagaaatactcacttgagcgttccgttctaactgagcaagaattggttaaaattgcatctcatccgttagtatccatacagtctcacacaatgtcacatcccatattaactaactgtgatgatgagatactatcgtatgagttgaacagctccaaagcttatttagaaaatctactccatcataaaatcgaagcattcagttatccgaatggaaacttttccaatcgagaaatcgaagcggtaaaaaaagcggggtataaaatggcttttacaacagaatatatccccatacaaataaatcataccaacctttacagaatacctcgcatggcaatgaatacatatggagggtattatgaaaatttatctaaaatattgggaatatggcaagatattctaaaaaaatgaagctattgataaacactccgagtctcaagtttttgggaggtggtgttgctaatcattatatcggattacgtacattttggaccgaaaatgttaaatacaatgttgtcggtcggcgtggaggaaaaagcggaagcggtaagtattggttgccttgggatatttttaaatttatatttcgtctgctaacctttcgcccgaatattatactccttaacccatcgcttggagataaagccttaaagcgagattttatatatttaaatatttgtcgattttttaggaagaaaacatctgtatttattcatggtttcaatttcgaatatgctaaaaatgcagactggaaatggataagtaccaatttgaataaagccttgtgtatttttgtgttatcccaagaatttaagaatgaattaatacgaagaggggtaaaatctgatatacatctaacttcaacaaaagtaccagattattttatttcaggttttgatctttcgatgagacaagggaaggctaaaaatattatgtatagtgggcgaatagaaaaggccaagggtgtatatgaaacagtcgatacattttcaatactgaagtcacaatacaaagatctaacattgacttttgttggtgatggctcagaacttcccaagttgaaacaatatgttgagaataagaaaataaaggatgtccgctttacaggaaggttatgtggtgaagattttaaaaaggaatacattaatgctgatatgtatttgtttctaagttatacggaaggtatgccaactgtagttttggaagcaatgattttcggacttcctatctttaccagaaaagtgggtggtctaatagatttctttgaaaatggaaagatgggatatatatcaagttctttagacccagtagtttttgcagaagcgatgaaaccatacattgagagttctgctaaaatgaagagtgtatcactctataattccgaatatgcaagaacccattttattgcatctgttgttgcccgaaaatttgaaaatacattaaactatgaatattttaagaatcaagagcatagagagcattaatttgtaacagggggtggagcgtagataatctgcccgaaagttttgtgtctaacttttttagggagcgcacttcattattggtgatattatcatatttgacacaattatccacaatatatttttatcaaagaaggtgctcgtttgatgttggaagtaaaaacaataacacattttcatatgaacattatattactctacagggtcgaacgttggctatttgaacaacatattcctgttttgcctaaaatcgtacaactattgatttttctcattttcaattcaaaaataactgctgattcaaaaatagggaaagggacatattgtgtgtgtaaagggattagcacggtcctaataccgggaacagaaattggagaaaattgtgtattaggattacgattttctactgtacggcagttcccatacaaagaagttcctcatctaaagaataatgtttgggtgggtcctaatgttattattgccggtcctgttgtaatagaagatgatgtaataatcgcagggaattcatttgttaacagaagtgttccccaaggtgctatcgttgcaggatgtccggcaaagattattggctggagaaaaaatcttgattatgcgattgaaacaaatccaaagtataaagaaggtcatatgccatttttgacaaaatgaataacatcaatgaatgatatagccgatgctttttataagctaaaaaaatattgtgaacgagaggatttcaaagggtgggatccatatgacggactaaactccaaagtatttcaagcattgccattgctgaaaaagtcagcagtatgcagattagtggtgatacaaggctttaagcggtgcccgataaatttgcgtaaattggcacttgtgccgaaagaatacaatgccaaaggcattgggctctttctttcaggatattgtaacctatataaagttatagaaaaacatccagagagagaaaaggagcttgggtcaaagcaagagtgtcgtcaaaaaattacagaattggctaatttgctgattgccttgcagtcaaaaggatatagcggatcttgctggggatataacttcgattggcaggcaagaaggcttttcctttttccgaaatacactcctacgattgtggcaacaaatttttgtgccacagctctgatggaggcatacgaaataacaaaacatacgaaatatttggaggtggcactttctgcagcggactttataatcaaagatttgcatcggacatcttataaggaaggattcttgttttcgtatagtccgctgcaaggaaatgatacagtattcaacgcttcactgctgggggctcggttgctgagtttttgctatcattatacctcaaaagaggaatatcgaaaattagccgtacaaactatacgggcttgctgttcagggcaacgaaacgacggtgcttgggtatatggaatgttgcccgtacagaattgggtggatagttttcatacagggtataatctggatgcacttatcgcttatcaggaaatgacaggtgacgagagtttcaaacgatatatagagaaaggatttaactattatatccagcacttttttgaacaggatggaacgcctaagtattacgataatcgcatgtttcccattgacattcattgtcctggacagttgttcgtaacactttcgagattgcacgaatttggcaatcaccgtgatttggcagaaagggtgatgcaatggactatactgaatatgcaggacaaaaaagggtatttctattatcaattgaaatctggaatcagttctaaaatatcatatatgcgatggagtaacgcatttatgtttaatgctatgatccattatttgctttccgaataacattttttgattttatggataaagtttcattgaacggggtcgaaatattccctttcgattccgaacagcaactattgcattatgtggatacgcataaaggcatgttgatagcgatcaatgctgaaaagatattgcatgccacggaacaaacacgtgtcatcatcaatcgaaatattgggtattgtgatggagccggtgcgcaaatggctttaaagcagaaaggttataaaggtgcctgtaagattcccggatgcgaactatggctaaaaattattactcgcttttacagggaaaaaacattctatctagttggtggaaagcagcaaatcataaatgagaccgtagagaaactacgttttgaatatgaggatatccaaattgtaggttaccgtaacggctatatcaagacggatgaggagaaacgacaattgatagatgatatagtggagaagaagccagatgtggtgtttgtggcaatgggctcacctaagcaggaattgctgatggaggaaattcagcggcaacatcgggcaatattccaagggttaggcggcagttttgatgtctataccggacatgtccagcgcgccccgaaatggtgggtggagcataatctagagtttgcctatcgtctaataaaagaaccgaagcgcctcaaacgacagattcatttgataagatacgcatggtggttattgataaaaaaattataaacagagaatatatgaggaaagtattgttggtttttggtacccgtccagaggccattaagatggctccgttagtgatggagcttcagaagcagaaagaacgtatagaaactgtggtgtgcgtaactggacagcatcgggaaatgctggatcaagtgttggaaatattcgacatcaaaccagattatgatttaaatatcatgaaacggggacaggatctgtatgatgtaacagctcgtgtgctgaccggtatgcgtgaggtattgaaagagataaagccggatatagtattggtacatggcgatacgacaacctctactgccgctgcgttggcggccttttatcaacagataccagtagggcatgtggaggcaggtttgcgtacacacaatatttatagcccgtggccggaggagatgaatcggttgttaacaggacgtttggcgacctatcatttttctcccactccgttaagtcgcaataatctgattaaagagagcattaatgaccgaaatatcattgtaaccggcaacacggtgattgatgcgctctattgggtagtggataaaatcaaaaacaataaggaactagataatgaattagaaagtgtattgagcaaagcaggttatgatgtgaaccgcttggataatggcaaaaaattggtgctgatcacggggcatcgccgtgagaattttggtgacgggtttatcaatatgtgtacagctattaaagacttgacaattaaacatccgaatgtggattttgtttatcccatgcacttgaaccctaatgtgcgcaagccgattcatgaggtgttcggggaggatctctccggtttgaagaatatgttcttcattgagccattggagtatttaagttttgtgtatctgatggagaagagtagtattgtgttgacggatagcggcggcattcaagaggaagctccaggattgggaaaaccggtattggtgatgcgcgatactacggagcgaccggaagcgttaaatgccggaacagtgaaattggtaggtacggactataataagattgtaaacgaagtgtcatctttgattgatgataaagctgcttatgaaaaaatgagcaaagctgtaaatccgtacggtgacggattggcttgcggacgtattgtaaatgcattgctatataggatataagctgaattatgaagctgacactgaaaaatattgaaaataagattcttaaagaggttgattgtgggttgactgctgaatctggcgattttaagacattggcagaaaatgtaattgcaatgtatcgtaagacggaagaagaaagattgcaattggggatgaatgggcaaacctattataaggtacattttcaaaaaaaggtatgtatcgacaaactagatcaaacaatgaaaatttgaaaaataatatgttactagccaatgaattattcaataccatttgggataaagctaaagattcagtacgtcacagaatacattttgatttgcgggattccgaaaacgatgattctcaaaggatgctaaatgtattggaaattgatacaaaaattcctatacatcgacacagagatacgtctgaagtggtgattatccttagaggaaaagttcgtgaagtttattttgataatcaagggaatgaaatagcatcatatctccttgaatatggaagccctattcccggaatttgtgttcctaaagggatgtgacatacttgtgaatgccttgagcctggttctgtgatctttgaatctaaaaatggaagatatgaccctctttcaacagaagaatttctattcaaatagaactactcgggaaaggcgggaaggatgcagaagaatccagccgtgtcggcttttatcagaaagactactttttttctttgaaggtgagtcctttgaaagaaggaaaatattatccggctatagcggtggggggtaatgacccgtccagatcgatcaattgaaggtaaggggggggatatgagcgttattttatgaattattatgtggctatgactaaacgtattcattttggccagcatgaattaggaatccattggtaggctctaccatggatgaaattgttgttagttttatattttggcgtaaataatatgattattaataactaatatatgattattcggtttttatatgtatcctctatcttatctccaaggtctccggtcttcttttctccttagggggagtaagaaggccggtttctttatcgtctatcctttatcgctttgaatgtcctcttcccttttagataaaatgccagaattaaactgtcccgcataagttccgggatggtgctcagtgtacttttctccagattctctttacgcttgggcgcatattccggcttcagctggtgataggctttccgtgcctcataaaccgctttcgcattttggatatgaccttccatcagaaacttagcggcggcgatatagtccagccaaaagcgaatgcgcatcacatgctttaaatcagcttcccgggagttcttataaagcatcagcaaactattccggaaattgaggaaggtcttgcggggactttccgcgttcaaggtggctccaccgacgtggtaaacgatggattgtgggacgcataccaaccgatatccccgggaacgtaaacgccaacacatatcgacttcttcttgatgtgcgaagaatccggcatctaatcccccaacttccttatacgtagccgtacgaacgaataagcaggctcctgtcgcccataagatataggcgggagtgtcgtattgcccctcgtccttttccacgatatgcaagattctcccccgacaaaatggatagccgtatttatcaatgtatcctccggccgcacctgcgtactcgaagtattctttatttcgttgagcccgtattttgggttggacacaagcgattgacggatcagagtcgagagtggcaatcggggcatctaaccaattgggagtaacttctacgtcgctgtttaataaaacgcaatattcatggtcgagccttttgagcgcttgattatatccttcggcaaaaccataattctggttgaaggagataatgccgacggtcgggaattttgctttcaacatctcgatcgagtcatcggtagaaccgttatctgctacgataacctccgcccattccggagagttggatacgacggaaggaaggaattcctccattagctttcttccgttccagtttaagatgacaatcgctacttttttcatccttgttgctcgtgtttatgtttccaacgtttatgggtccatagccagtaagccggatcacgcaagatcattttctctaaaagtcgtgcgtatcgctcggtgatgtaattctccggagtctcttttggattctccgtaatcagcttcatgtctacggtgtaatatcctctttttaccttttgggtatcgaggaagatcacaggcaggttcagtttccgtgcgatacgctccggaccggttaatatggctgtatcttgatgaaggaactcggtccaataatgcaggttggccttgctgggtgtctggtccgccaagaagatgacgactgatttggttttgtcttgttttaacttgatgatatcccgtatcgtatcgtttttcttgatgccgaaagaaccgaactgtgtcctgagatcggcgaatagcttatcaaaggccttgttgtttaacggacggtatatctgatagatgcgtgagtcctcgaaacgggtggtcgatccggagaaccattcccagttgccataatgccccatcgtgaggatgaagcaagtatggcctttctccataagttggtcaaccaattccgggttcttcagataggctcgctgttgtatctcatccagagagatatgggccaatttaatcgtttccacgatataatcggcgaaatgatggtagaaccggcgttccaactgacgccactcagccttggatttatccgggaaagaggcggttatattacggcgcactacttttacccggtatccggctatcttatagataaggacatataggatgtctgataacacgtataaagcccgcatgggaagtaaggcgtgtacttttacccagctataaagaaaggcatattgtattttattccacatctcagttgacggttgatgattgattgttgactattaatgcggtgcgatcctcattccagccgcctagtacgactttgcgggtctcattgaccaaggtggcatcataagggatttctacctttatatagttctcggtgaaaccgtgcatcttgccgtctttcttggtatgctcgaataagacattcgcttcctgtccgatatgggcctcataaaaggcatgtagtttccgatccgagatatccaagagttgttggctgcgtgcatgcttggtcttcggatctaccacgtgatcgatcttcaacgcttgggttccggggcgttccgaatagctgaacacgtgaagttggcttatatccaaactgcctatgaattggcgtgcctcctcgaagtactcgtctgtctcgccacgggttccaacaattacgtctacaccgataaaagcatgcggcattacttccttgatcttttcgatcttatgacggaaaagagcggtgtcgtaacggcggcgcattaattgcaagacagcatcgctgccgctttgtaaagggatatggaaatgaggagcgaaacgtttgctgtgagccacgaagtctattgcctcgtcggtaatcagattcggctcgatggaagagatacgatagcgtacgattccatctacctcatccaaagcccggattaagtcgataaaggtctcgtcggtacttttgccgaagtccccgatattcacgcctgtcaatacgatctccttgcctcctttacgtgcgacttcctgcgcctgttccaccatgctggcgatcgtcccgttccggcttcttccgcgggcgaagggtatggtgcaataagagcaataataatcgcatccgtcttgtactttcaagaaatgacgggtacggtcgtccgccgagcaggaaggggagaaggaacgtatatccttgctttgtgaggcgataaccgctccaccattttctttcttctctaggttctccagatattgaaggatctctaatttctgttcggcgccaagaaccaagtcaacgccttctatatgggagacttcctccggcttcaactgtgcgtagcaaccggtcaccacgataaaggcaccggggtgttgtttaccgatccggcgaatcgcttgccggcatttcttgtcggctagttccgttacggagcaagtattcaccacgcatatatccgctttttcaccggggcgcaccttgcgtaccccttgttcggctaatagctttccaatggtagaggtctccgcaaaatttagtttgcaacccagcgtataataagcggcctttttattgttaaatacggtctgatctatcattttcgatttagttagagtgcaaaggtactaattaagcccggattagtaaagagttcggattgagatggacttaaaaactcattactattgcataaatagttttccggaagcttatctattcttttttgctattggatatattctacaaaccacggcgtggtttgtgcgattcacgtcatggcctgtataaaccatgacgtggtctgtaaaaaccatgccgtgaactaaggaatagatacagtcaagcaacattatttatgaagacttgttatcgaatagtccttgctgcggccttgttttgtttattgtgccgatagaggaaatacggcaactagggttccactaagattaataccggattgttatcattctcgggttgctcccagtcgattaggtaacggttgtcgtttgagatgtatttgggagtgaaataggcttcttcgggaagttcaaatgagttttccgggtatatgaattgtacataggctaattgcttctccgctatatcataatataatgtataggtatctttatcagagaagttatgcatatagagccggtctccgatttgcccgggtatgacagggattgtctttgtcctgaacaggtcgttttttatatcgtctatcgtgatattataacggagttcctcgggtgttcggtatttacctagatcgaggacggcataaggagttagcttcatgtcgttggaaactttaaatatcgtatcgcagaacaactccttaaatgcggcaatcttatttccgtcgaaaggacggaactcataggtaaatgtcatgacgaaaggaggttctgtataagatttatagtaaggtatgctatccgatatgactgtatcttggcaaaaatagaaccgaatgggtgcgttgccagagaggttgggtacgtgacctaggataacgttcgtcttagggaggggataaaatccccggatgttcttatccggaatttgaatggtttggtggaatttcccttgccaatcgtatatctttatccgagtggggctatcttttatataaataagatgatcatgaggttctagtccggatatacgactaaactcatccggacctcctccttgtttgccgatatcgtataaatattttcctgccaagtcgaaaacggaagctctgttatcatgctgtaccaatagcttatcgccatgtttaataatgcgggagatgtatttgatcaagattgagtcattcgtttgcagagggatgaattggatggatttcgcccatttctttaaggctacttcttgaggctgatggtcaaaaacagttgctaggtcaattgttatacattcctctgatttctcgcttgtgccggtacaggcggttagtaatatcgcaaatataataagccatttattcataaaaatatctttgtcctaaagttgataggacaaagatatttaatttgtttcgaaatattcgtaatattatgaagattttgtactgttatttccaatccactaaggatgatttaaaatagttccaatcggccttttcccataagggggcttgcgcaccaagtcttactttatattcgtcccaatgtgtgttctctactttggaccaacctttttcggcgacacctgccaaacggggcattaacaggaattgcagatctctgaaattggtgatcgtctcgcaccagatagcggcttctatacccgctacatctttttgaggattctctacagtcgggttgaaggtcatcgggtcccagtcgtacatttcttggatcgtttgtttctcgtaggcggccatacctaaacgttcttgctccgcgttttgggtggagtccgcacttggttccagatatttatggtccagataaacgtaaccgctcggcgagagaatcactttcgcttttttggatatcccaagacccggatcttttggtgcctctttcatgaattctgcgaataaggccatgatctctttatattcggcaggtatattatcttttttcttagaagagtcctcgtttttttgcttcagataaatccagtgctggatgacatcgccttccgagatatccgcacgggcggtttcttgccagccgaccattttctttccattcttcaatacgatttcccgtgtcttatttataaaacggacgaacttatcatggggtaagccgatcgcctcgtcacctccgatatgaatgtagtttccgggtgctaaagcggctagctccgcgataacatcctccgtaaattgcatcgctttcggatcatctacgtcgagggcattgaaggcctgtcccgggatgttaacattggtcttgaatttgacagcgttcttaaagtccggataagcggcgaatatggcagctgtatgccccgggatatctacttccgggatgatcgtgatgaagcgttcgttcgcgtaattcacgagatccttgaattcctcttgcgtataatagcctccttttctcccgttgttgggaagttgacctcctatttccgctagctcgggatatttcttgatctcgatacgccaaccttggttatcggaaagatgcatatgcagtacgttcatcttatataaggcgaccatatcgatcacttgtttcacttcctcgggatcgaagaagcaacgagatacatcgaaagaaagcccacgccaagcgaaacgaggtgagtccttcacttccagtagcggtagataaatcttctcgcctccgggttgtagattaccacccacgatttgtttcaaggtagtgatacctcgatagataccttctagggtagtggccttgatgtagatgtttctcttttggatggagagggagtaagactcatctacggggacactatctttcggactcaatccataagcttttggcaggtcggcgaactctttcggatctgtcaactcgaggaagatgatgcaattcgattctttgtctgaggcggaagccagcttgatgccggatagcttttctatctcgttggatagcaactcgcccataccctttaaggattcgtccgcataaccgatctcgatgccgggatggatcgtgaatgtaccttcgcctactgtcatttgggccggagcggggataatgcttacgcttctttctccaacatctggggatgaacaggcgataaatgtaataaaactacagagggtcaatgcccatgcgagagtgattcttttcattcttattttaaatttataggttatatcatggcaaaagtaaggatttgtttttacttttacgcaaatttcacaaaagtgtgctatgatcaaagagaatttcattaagatttacgaggagagtttcaaggaaaactgggccttgccggcattaacggattacgggaaaagtaaaacctttactttcggtgatgtagcaacggagatcgcacgtattcatcttttattccatgagtgccaagtccgtcgtggagacaagatcgcgttgatcggtaaagacagctcccgttggtgcatcgcttatatggcggttgttacttatggggcgattatcgtgcctattcttcaggactttaatccgaatgatgtacatcatattattaaccactcggaatctgtctttttgtttgttagcgaccggatttgggattctttggaggaagataagatcgaagaggttcgcggtgtattctctctttctgattatcgttgcttgcatcaacgagatggggagaatatccagaagttgatgaaatcgctggatgagaagatgaccgagaaatatccggatggcttcacccaagaggatatcaaatacgctgagctggataatgacaaggtggtagagatcaactatacatcgggtacgaccggatttagcaaaggggttatgttgacggggaataatttagccggaaacgtgacgtatgcccggacactggatctattgttccggggtgaacgtgagttatgtttcctgcctctggcccatgcctatagttgcgctttcaatttattggtacccatggcattcggtgtgcatgtctatttattaggtaaggtgccgtctcctaagatcttattaaaggcattcgaggaggtgaagccgaacttgatcttgatggttcccctgattttggagaagatctataagaagatgatccttcctcagttgaataagcgaaccttgaagttggccttgaatatcccactgttggattcacgtatctatgcgcagatccgcaaacatttggtggatgccttgggaggacgtttccgtgaagtgatcgtggggggcgccgccatgaatcaagaagtaacggatttcttgtataagatcaaattcccgttcacgatcggttatggtatgacggaatgtggcccgttgatcagttatgaccataataatgagtatgtgcccggttcttgcggacagatcttgaaagggatcatgaaagtccgtatcgattcggaagacccttataataaggtaggcgagattcaagtatcgggcgagaacgtaatgaaaggctattataagaatgatgaggcaacccaaaatgtcttcacggaagatggctggctaaggacgggtgatttgggtacgatcgatcatgacaaccgtatttttatacgtggacgtagcaagacgatgatcttgggcgctagcggacaaaatatttatccggaagagattgaatccaaattgaacaatttgccattcgtgatggagagtttggtcgtggagaaaaacgggaaattgatcgggatggtgtatccggattacgatacggtggatagtacgggtatctcgcatacggatcttccagttatcatggaacaaaataggatagagttgaacaagctcttggctccttacgaaacgatctcggagatacaattgtatccgacagaatttgagaaaacaccgaagaaaagtattaagcgttacctgtacagtaattattgataaataaatagaaagcaaacgcagctaatattcagcatattgtaaaagcggtagaaaataattcaaaaaaaaacgtcttatgttgtacaacatatatgattaatacatacatttgcatcgttttacaacaacaagatattatagaccgtttaaattaagaacaaaatgaaaaagttagttgcatttgctgctgttatcgcagctgtatcattcgcatcttgtggcaacaaatctgctgaatctaccgaatctgttgctgaaacagaagaggctactgtagttgaggaagctcctgtagtagaagaggatgctgccgctactgattctgtagctgttgaggttactgactctgttgccgtagaagctgctcctgctgaataataatcagtaaacgagttttgaggacagtctgtatgcgttgaacatacagactttttttgtttataaaccatagataatgatatgagacaaattttacttcttccattggccgctctattggctatgccggtattctcgcagactcctgccgatacgacgcttacgattcggaatatagagattcagggtacccgtttcgccgggttgagcgagaggggtgggatgaaaatcttgcgggtagataataacttgagtagcgttaccaatacggcggcggatgcttttcgccaattgccttctgtcataaccgatatggaaggagccgttacatacaggggctccggtaatgtcgggatgcttgtcgatggagttccttacggtttgctggaagaatatagcggtgacgtgctgatccaacttcccgccctgttctttaaccagatctcattaggggcatttcctccgattaatgcggtgccggatggtgacgcgggcatactcaatctggtgcctcgtatgtatggaacgggagattcccctctatatgttacgcttggggcgggatggaatgagcgatataacgcaggagcggtattgaatttgcatcccggaaaattccatatcaatgcgaaatacaattataggagggaataccgggaacgatctttcagcaaatcgaccgcgaccgctaaaaaccggacggagatgaataataatgccacggctcgtccggacgtacatgtggcggatatgaaagtagactatgatctttccgcgaaagaccggatcaccgtgcatggcctgtatcatttgatggattatagccggtatggacgcattaacaaccgggtattcaacccgaaaggggagcaaatgaagtacgtgatccgtaaccggtataacgaccagcgccaggaagcttatgccgccgaagcgtattggaaccatgagatttcggagaatcaaggtttttataccgtattcaactataataatttctcgtatgatgaggataatgatttcaagaatgagaatcctcaaaacgggaatatcgtctcggaggataaccaatctatcgaccatacgaaacataattatttctggggatttggatatgggcaggagatcgatggttgggatttcaagcttggttatataggtcgtgtgcgaaacgaggattatctgacggctgcttttgataaggttgacggtagttttgagttaagtccggcgaaatcgtataattacgatttcaaccgttatctgaatttgatctatgcggacgtggttaagaattggggcgcttttaacgcagagatagggatacaggcggaatttagtcattttaagatggatgagtttagcccttcttggatcaacgatccttattggcaggggataaaaggcaaagagaacaagagttcccgttttcatttgtatcctcgttcccgttttacttatgaggtgaataagagcaatcgcttaagcttgagttatcagcaacgggcgattcgtccgaatggcagctatttgtgctctttcttgaataacagtgatcctacccatatcatacaggggaatccggacttgaaggatgagtttatccataacgtagagctaggatatcagttctcggctccccgtctccgtttgactccggctatttattaccggaatcgtacgaatcgtatcatggaaaccgctagccaagtaaatgacgagacggtttggaagaaagagaatatcggacatagccaagcagtcggagccgacttgtccggtagctggaatccggtacgtatcttgacggtcggtttctccggggatatctatcgggacgagatcgatgggcgtacgataggctatgacgagaagaaatccttggtttgctgggatgtgaaggggaatgtaaacgtaagtattacgccgactacggattttcaggtagacggcttctacgtttccgaccagcttacgcctcaaggtaagatcaaaggccgttatagcgtaaatgccggtctctctcaatatttcctcaatcgtaaattatgcgcgaacttaagtatcaacaatatattcgatagtttagaagaaacaacgattattgatgccccgaacttagaaatgacgcaaaagcgcaatcgtgatgcccgggtagcttggcttacgttgacttatagtttataaagtaggttccgtgccctgtgttccatcttgtttgtgcttttggatgaacaagatgaaacgcatggaacggtcgtacgtgaaataattccagatccagtcgatcagtacaattagcttattcttgattcctaagatggaacgtaaatgtacgagcatccaaaccaaccatgccgtaaatccatgtaatttcaccttatttaaatcggcaaccgctttattcctgccgacagtagctaaagttcctaaattcttataatggaaaggtctcggtttttttagagcctcgatccgttgtagattttcggctaataactcaccttgctgaatcgctacctgagcgacttgcggatgtccgttcgggtaatccggttctgccatccagcagacatctcctatggcgaatatattggataagccttttacttgattacattcattgacgataatccgttccccccgggtcaagagttctccttcgatatgatcgaaatgcaccgctttcacaccacttacccaaagtaaggttctagtgggtatggtttggccgtcatctaagaaaacgttcccatccttatagtccacgacacgcttctgaagaatgatgttaacgcccatatcctcaaggaagcgtttagcgttggaggaggcttccggagacatggcccctagtaatttagaggacccttctatcagatagatattcatatgaaagtttcctagatccggatagtctttcggcaaaacaaaccgtttcatctcggataaggcgccggatacttctacacctgtagcccctccacctacaacaactatatttagcaaagcttgcttctcgtccgggtccgtacaagtagtcgctttctctaaattaattaataaggtgtctcgtaaagctaacgcctcttctaccgttttcatgggtagagactgttcctcgatcgttttgtttccaaagaagttggtgatagttccagcggcgattacaagataatcatattccaattcgccgatggaggtttgaatggtatgccctttcggattgacgccatagacctctgccaaccggaagtaaaagttctttctcttctggaatatctttcgatatggaaaggatatttcattatattctaagccggaggacgctacttgataaagcaggggaggaaactggtgatagttgttcttgtcgattaagactacttgaaacttgctctttttcaatttctcagctagttttaaccccccaaatccgcccccgataattacgacccgctttttgtctgtgtaaggaatgttgaagcccatgatctaaacgctttttttatataaacatagaaagaagcgaattggttcttccgttaattattaatgaatgtaagcgggtagaggctttatttacaggaaggtttatcgtgtttcggggaaatacgtttctttaccttccgcttcaatcgcaaaaactgcaatatggaaagtatacgcatcaagattatgaataagataacccctagcaaaatatagcaaattatcggcgatgtcattttaccctcttcttcacaaattttatcccagtctttaatttggaatagtaaaacataaaaaaatatggtggtcattatacactatcttttattagatcatccatacggataggtgtctaaaatcaatgaggcaaagataaatgagtataacttattaggagttatacaacttgacaatttaaatgtatattctgatagggggtgttttttacaacgatttaagttttttccttagctccgtgggactatatccaaagcgtgctttgcaaaatttgtagaaatgcgaatgcgaggagaaatcgaattcatctattatattcttaaaatcatcctcgctgttagctatggcgaccaatagtcgtttggatttctcttgcatcagccattcgtaggctggaataccgaaaacttttttaaacttcatccgaaaggaatttactccgtaacctatcatttgagctagatctgttactgttttagcttttatataattctcggcgatgagtctctcaaactctgctgaatgcgtacttgataaatagaaaaagtagtctaattcctcttttctataaagctttttcagtaagtagaataattccgttctctttaattcatacaaagggtagttcaggaaattattttcaagatattgtccgacaagttctagaaaaccgtataaaggttccactattttcagttctatccacttagagataggttgaggtaatattccgtacggatgttggtaatacggtaactcattcatcgttaaactgtcaaaaaagaaaatgatgatttttgaacctagtgtgatatcatatgtgtaattttcaaatgatcttagaaagatcatatactgttcaccgattgttttcttttcttctttagtggaatatatagttatggatccgcttaagataaaaataatcatatcgctggataaaccagatagggtttgtgttatttcctctgacatcaatatgatactaaagccagcgtgtaagattcggttttcagatgtttccggagaaattctgttaataagcttgttcataaaattattgttatcctcaaatccgcaactacgcgcctaatatgatacagaagcgaaaagaatctgcatcgttagtaaaaagggggcacagtgcatcgaatgtcaccataaagacatataaatgccccttaccccaccatgcgacttgaggcaatacgcaaaatcacgactataagttgtcggtgttatccaaagtcattctggaacacattggcataagcattgttgcatgaatagatattcagcacatacttccttgatgtcctgacccatttggctggcacagagatgaacttaaagacaaacgtcttgatgcggcttgttgctttgagtccgaacctcttcacgtcaagcctcgccatgatgaatttatagaagttgcgtatgagtgccataagcagaagaaacaccgtgttttctcccataaaggattttggaagcctgttccagccgaatccgttattcatatcatcgaagatgcgttccttccctccacggaggttatagaattcgacaatctctttctcggaagactcgtagtcatttgtaaggatgcagcggtaggtgtattctccttcccacaggtcgagttcgccgtctatccgcttctgtctttgaatcacaagacggtatgccttccctttccatttctcgatgagaatggaggccagctcaaactcaatgccgcccaattccactttcttccaacctctgagggcaaagatgtcattgtagagcgaactgcatcggttagcacggatatagaaggtcttgcagtgtttagcaatctcttccactatctcttcagaacacgagccgcaatcagctctgaaacggttgataataagcttgttttgttcaaacctttcaaagaacctcttcagcgtgtccttctggtggaaacggacatttgtgttgccgtcgctgttctcaatgccgacaatcaagttgccaataaccgccacgccagggcgataaccaaggaacttcttgtatgtaggcttcgcatcaaacttctcagcctctatgaactggtggtcgaagtcaacgtcatacccctcgccctctttcagctgccctgtggacaataggcaattgaggagcagtgtattcagcttgtctgccgtgttgaagtcgtaggtcttgccagtgtcggatgtgtaggaaatgttatcctgggtcagttcctttatggctctaagaatcgtgtcggcactgcatgtgcgaagtgtcggatgaagcgaaaggtggtacatcagatgagtggtgacatcctcgatgcatgagccgccacaaaaataaacgctcataagcgaacggatgatttcgctgtattgataaccatacagcctgcatctcataccgagggttgagtcgattacagatgagagtctggagtcaaattgctccattattgaaaatattcctccaaaaggagtgagtttctcggatttaattgctacctttgccatgtctgtcgggtttgatacatattttgatttgcaacactaagataggtgaaaaatctgacatggcaaattcctgagcaactttttgttgctcaggtacttaaaaagttatatttgtaatagtgttgcggaattaagggttatttagtttgtcatacaaatatttcccccttcagtaaatctagatgcaaaaaaagcgcaatgtattagtatggtctgtatacaaactatcattttttgtatacattatgatatgaatgaaaaataaataggaatcagaggaggtctctgattccttgtaaaataagatctcccatttttttatgggaagaattaagttcactaatactttaggagggtaatttctattatcacaatagaatgaaataaaaactaaatacgtcttacagatgaaaataagacattacgtgtgaacaagcttgaatattataacgtattgtattttattttcttagtcgttttatttatccgtgcggaatggaagcaccggtaatccttgtacgttttgcaagttgccaatttggaaattccggaagccataacgaacggctattggggcttttacgtctggagctgagataataacggtttttttgttagcgtctatagttgcgttagccttgtggaaacgcatgtcttttccggctatctcgaagcctatgatcccgttatctcgattgaagccatcttccgcattcttgaaaaaaagaatgattttatctttatctacttccatatgatcgtattgggggccctcacaagcgatggttgtataaccataggttttgtttagagccatataacaaagacgctcaccgatcttttgtttttctttggggtgtatttgccgtttctcgtaatcctgtaccagatcgttcgtggaaacaataccgctattggggatcaaccgggtagctttgtattgctcttcacgaaggtacgcagcttggtctccttctccatattcgtaaggggcgatttctaccagatagaaaggtaattcttcttgtccccataatcctctccaatgttctaccattgtcgctaggcgtttagcgtagtccgggtgtccgacatttgactctccttgataccataggaaacctctgaccgtatatttgctggccggtttcagcattccgttatacatgatcatgggttgtagcatcggatggattttctcatcgttacccgctaaggatagatcgatatcgctataattccgcaggatgtctttgggcaaccaaccttcaaccgtggaaccgccccagctacaattgatgatacctaccgggacattcaatacctcggtcaatagggtcgcgaagaaataggcggtagctccgaactccggggcgtttcgcggatcacatactttccattcgccacctaccggataatctttcggttccaaggatccgacccgttggatcgtagcgtaacggatcgagttcttatatttcccggatgtagcgatagcgtggtttcctccctcgatagggcagtgccagaaacctcttaatggcatttccatattggattggccggaaccgaaccatacctcgccgatcagaagatcatgcaagacaatcttgtcttgtccattctctaatgttaactgttgcttttcgaaactggccgagggcgtctgaacccagatttcccatctgccttgatcgtttacttgggccgtgtattccgtattgtcccaagaactacggactttcaggcttgaatttggggttgcatttccccagagccgtactttagtggcttgttggagtaccatgttgtcgcttaccaaagctggcagcttgatctcggcccggaggttcaccaaaccgagaaggaggcctatcaccatccaatagaatttgttcatatcgcttgtttttttgatgtcggaagcttccgacggttgttaatctgataaaaaagagccggcaggcggtctgccggacggttattcgccggcaagtcgttcgataatctccatacacatccgtccgttgtgatagggacatttccagaaaccggccttgtcatccttgcgattgatctcgtgatcgagcgatacgctccaatgccattccccttgttccttgtcgatcaaataacgctgaatgaatttccagcatgtataggctgtgcctaaggcaggctcatctccgaaatgttgatacaagttgaaatgacccactacattctcggcttgcacccaccaatgcaggtccgtgtcggctttcttctcattcgggtgatactcgtaaatgaggctaccgttcgctaataacccgtcttcggccgctatcgctaccttttgaaccaagggctctactttctgaagaatctcgttgtctcccaattcgatagcggcctcatgcagtaaccaagatgcctctatatcatgaccataggagataatacggtatttgctttcccaatcctcgttgaaaaagaggtttaaatgataggtacggtgatccagaatcttgtcggtgaaaatcaggatcaagtttcggagttgttttttgaggtgctcgtctttccatacccgatacaagttagtataaggttcgaggatatgcagatgggtgttcatagtttttttctcattctcatccttgtcgcttagtcgcatatcctctatcagtttccagtctttcgtaaaggcttccatataaccgttcttttccgggtcgaaactatattgttcgattgccttgaagagacggatcgcataatccaacgcttctttatctccggtagcccggttgtactcgcttaatccgtagatagcgaatcctaaggcgtagatttgctttttggtttgcacgggttgaccggtatagtctaattcccagtaaataccctcgaattcttggtcgtagaatttatcgataaggtaacgtttggcacgggtcgccgtttccagatattccggctttcgtaataaacggtatgcggcggagaatgtccataggatacgggcgttcaagatggcgcctttaggggcatgtacgactcgttgattgtttcccgtgatttgcccatggaaaccaccatactcactatctatcattcggttcatccagaaagggaggatattgttctctagctcccattgaacctcgttttgtaaatcttcggtgattttattcatttgtttcttttcttttggtttctaacgtagcggtgatttccttcatctttgtctcgctaagcgggtagaaggcgataaatacaacggacaggatcgtacctacggccggtaagaaactgaggaacatcttgattccgctaatcgtttcctcgctttgtacggtattggcctgaaacccgaagaaagcgagtagccagcctgtgatagccgtgccgatcgcccatccgaatttctggctcatggacgaggaactgaagatcaatcctgtggcacggttccctgtttttagttctgagtagtccgtgcaatcggcatacatggaccaaagtagggggaaaatactaccggcgcaaatactgatgaacacttggaacgtgaatatcagggctagatccgtcttgtcgagccagaaaaagaggatgcttaaaaccgaggcgatcagcatggagcccatataggttcttttctttccgatctggttgcttaatggggcggccaagatcacgccgacaatattggccgcctgtcctaccgccagatataatccgcttaagacgaaggagactccgaaaagagatacattggcataggcttcctcaatgataaagtatttgaaataatatacggtagccccgtcgcggatggaattgaaaaccagagcggagacacctgctcccaatagtatccaccaaggcttgttgtgcaatagatctctcaagtcatcttttaacgagccttgttgctctttaatcggttttacccgttcttttgtccatgcgaaacatccataaaagagaatggcgcacaggatagcgataactacgacagccagggtccatccatgttgttgatccgccagttcatcgctatttccgctaaagaaacgcaccatcggcatgaatagcaacagggctataaaactgccgatataggcgaataccatacggtacgtagaaagggtattacggtcttgcggcaacgggctcattactccaagcaaggacgcataaggcacgtttatagcggagtacaccatcatcatcaaggaataggtgatataggcatagatcaaattacctgtttgtccgaaagaaggagtcgtgaaagtgagcactccgatagcggcgaacgggatcgccagccaaagtaaataagggcgaaattttccccagcgtgtttgcgtacgatccgccgcaacgccgacaatcgggtcaaagaccgagtcccatatacgagttatcaagaacatcgtacctacggctgctgccggtaatccgaatacgtccgtatagaaaatcatcaagtaagcgccaaacagtttccagaacatggacgatgccatgtccccgaaaccgtagcctatcttctccgtgagtttaatcatatgagtggtttttgtaagttatttcaggagtggaagatttcgatcgattagctttttcagcgtctcgacagatgcggtcgtagtcagcccgtcggccggagtgttcatgcagtaatctaccaatttatcgattgtggatacagccacgtgcatacgggtatcggaagacgcatagtaaatatacacggttccatcctcatccgcgatccatccgttagagaataaaacgttggatacatcgccgatccgttcctcattttccggagccatgaaatagccggcgggtgtggcgataggtctcgtgggatcttccaatgcggtcatatacatataaagcacgtaacgtaatccggcggcgcatccccgtacgccatgggcgagatgtaaccagcctctcggtgtcttgatcgggtgggggccttcgccatttttcacttccttgatcgtatggtagtaacgttggtcgatgatggtttcttccttgacttcggcgtgcgtgatatcatcaatcaaggcccatccgataccaccgccacttcctgcgtcgataaatccgtcttgggggcgggtgtaaagggcgtatttaccatttacgaattccggatgtaatacgacgttacgttgttggctcttggtctttaaatccgggagacgttcccagtttttcaagtcttttgtccgggcgatagctgccgtggcggttgccgaggatagatctccgggagctgcgttcgcgtcatggcgctcggcgcaaaagattccgtaaacccagccgtcttcatgagcggttaggcgcatgtcgtaaatattcgtggccgggacaagatcgtccggcatggttaccgggtaatcccaaaagcggaaattgtctattccgttcgggctttcggctacggcgaagaaggatttacggtcgcttccttctacacgtaccattaatatatatttgccattccatttgatcgcaccggagttcatggttgcgttcatgccgatgcgttccatcaagtaggggtttgtcttttcatttaagtcatatctccagaagatcggggtatgcgcagctgtcagtacagggtgttgataacgggtgaagattccgtttccgtcttctaaagggatatttttccggcttaacaaggtttcgtgtttagcgaagagttcgtttactttttcttgaaattgttccatgatgtttttgctttaaatgatattatcagatggtgggagacggggcacgccccgtctctacaactggatatgacgtgatttatctggtttatgtatgatgttatttatataggttgatatcggaggcgaacaatgttttcggattttcaaagaacttcttgaaatcctcggcagaggcttgtccgggataagggccaaaaaagtgagtgactttttcacgggcgtttctccataccaatacataagcgaccggatatttctccatggcaggcagcagggttcccgtccaccatgtggagtctggtaccccttcgtagccggtctccgtgatcgctatgatcttatggttggctttgcctatgctgtctattacggaaagactggtatccatgcttttcaagaagaaatccttatcttcccgttggtaagcgtcgaagcctaggacgtcgatcaagtcatgtccggggtaacgttccagataagacgcttgatcccgcggctccgtacctgtggaataagcgtaaacgatctggtctgccgctccgtgagcgtttagataatcggcggtcattcgccatagcgccttgtattcatccgtggtacataaattctgtccccaccagaaccaacttccggtgtgttcgtgccaaggacggaataggacgggaatcttggtgccatcgcttgttttcaaggaaaggatgaaatcattcactttgcctagccaactttggaatttctcatagttctccccttccggaaggatcgatttcacgacagcatggtctgatacgtcccaagcgtcccctccggttttagggttacggggatgccaacttaaagataccaagcctccccggttatattggttgatgatttccttgcgtattttctcgaaaggtactttatcaaggcttttatctcccccgagttcgatctctccaagatcaaagctgataacggccggataatcgccgcatactttttgcacgtctgagcctccttcgtcaaattcccatccgatcccataaaccgtatcatcgtgatgtccgaacatgattcctttttgtggaatcgcacgtaggttctctattaaacgttctctcggcgaaacctgttcgcttgtcggctctagtcctttcttcgatggtgaacaggcgattaatgcccctaggcataacatgataattaatttcgtgttcttcatgataactgtctttctttatgaacgcaaatgtaagaggtatcgggcagacaatctagtattattttatcggatagtggtattatttttatttcttagcttgtacctgtatacgttctttcgaggttatcttcttttcaaatacccttgtgtcgatcttgataggctcgctcgtgaaatccgggacattataggaataaacagagcgatcgtaataggtttccgtatcttcctggggaaggagaaagggcttgcttatcttgccattctcatccatgcttgccagataaaggcgggtataaaggccgtcaccccggcggctactgaagacaaaccagcgggagttgctactccagttgtgaaagctttcggtatcatcgctatttacttcggatagctcgcggaggtctccgcttgtcaagtccagtaaccatagattcgcctctttatgccagatcgaaaagtttccgtaatcggataaggtgaacataatatatttgccgtcataggaagggcggggaaaagatacgcttttccctaaagcctcagcgttcaccaacgtatcgatacggctcccgaatgtaccggcagagggatcaaaatcgatactacataaattatatcttatctctttatattcttcgggaatctttttagcttcggcggaacaaaagtaaagcgtacgaccatccggggagaacgcagggaaggtctcgaacctgtctttcttttgcaaagaatcgcaaaggagtagacgatgatctgccggatggtaaacgactatatcagattccaaatccaatacttctacccgctcgtccttaaccgtatggaacgattgtcgggtgttgttcgtggaatacgctatatattcgcctccgggatgccagtagggatagacgcaagcggcgattgtctgatctgttttcgtgttgaggtattcatccttattgtcggttctcataaaagtggctccatgcgttcctcggatgtgaagactgaaatggctcgggtccgtacggttaaaggcatggcagtttacgcacatacctttgaccagcgtgttttccaccaaaggtctttctttatgagacgatagatcacgctcataaatacccatacggctgtagacttcataaccgggagcgatctttcggtatactaagccgtaatcgatcgggtgggggctgatgtacatggggaaaggtttgtaagtactccatttacccttttgcttgatactgacagtaaagagtaaactatcgccttgattggagttgagcagttgcttccactctttttccgggaaattgacatgctttgcgtttatatgtacctctttgccttggtgcccttttacgataacatctatccgctcataggaggtatccgtataagagaaattcataggtgctatcgtggcgggaattgtcaccccgatataatccggatagatggacgggtatttctctatttgttcgggggataccaccgaatccccacaagcggtaaataacgctatacatatactatataataagataagctttctcatggccgtttattttctgaataataagtaataccaaaatgtcttctcgtattttgggcgaaggataggctcggagtctttctgcgtcatataaacacgggcgaactcgcttaccccttccaatacgttgcgggagatgctccaaggaaggccttggaaattaggatgctgctgtgtccaaatgaaaatcaatgcctcttgataagagatgggtatgtggttatagcccagatcttttcccagcggataatatttcatgaaacgttccagatccttcttttgcaagacataggctaacatatactcgaaagccatccggttacttttgttatgttgcagcaataagcctagcatgacatccatttccgtgtcgctgaacaagaaatcttctgtatatcgggcttttctcaaccatccccattcgggatgcttctctatcttttcatcgttatttagatagctcatggcgttggtcgcccatttcttatagaacaaggtatgctgcaaagcccgcaggtatttggcggcgacagcgtattgtccattgatcaagttggtctcggccagacgcatataggcacgtccgcttttcttatagtcggggatagcctccatcgcttcgaacatatagcgttgtgaggagttgatcattcccagatgatagaatatctcgctggtagggagcggtgaggtgaaatctctttggaaggtggggatcaatccttccgttccattttggtagaaatggaacatgcgatcccctaattgcccggtcttggcgagagccagatttaagcaggtcacggagaaaggagaattaggctctttgttttccgccgccttgatgatctggttccattgtttcatgcgggtgaggtagtcgtatttcatagcctcctccttatccgaattgctggcggcatagatccatgtgccaccaccgataaggagcagggtggagataatacccatccatgccttagtgctctttacgggtgggggaagtaaagcaagtgccccgggggttatggcaacggtagcaataacaagtaacagggtgttgggaacgatcatggggaaacgataataatcgatgccggtcatgaggctaagcaatggatattgcgtaaggctttgtgccaatagggggcataggattccaagcaagatgtagataggaatccatatataggatttgttggatacgattggtacgggtttgatgcaatgcccgattgctactccgataacgaagatgaaataggccccaccacctacgatccagtagagtaccggcattattaggagcgtatagattattcgtccccatggatgagtgatttttcgctggatgattaaggcgaagagggcgagagttatggagacagggaatgccagcagggcattctcatcacataaaaatacccagagcaggatagaggggagaaagctgaacggataccaaaagtcggaagttcccatttgtttggccagccagtttatttgccgttggataagcacgagaacgatcgccaagatcgtagcccctgcccaagcgaaataatagaactgcgtcaggaactccgctatatattcagcgatgcctccgggatggagacatttgtcgattccatattccggcgtgaacaggaataactggaattgctcgtggtaatgtaaatgatgaggataataaagtccccaaaacaggcaaatcgcacagccgaataataaggaggcgattcctcttatgtatctatatttacgtgtattttccatgattctattatttaaaagtctcagcttcctcgtcgtagtagatttcttgtacatcttcagcgtcgaaaggaagctcgctagtggataattcaggtatattataagatttcaacgtgatatcgtaatgttccggatcctcttgcgggagaacgaaaggtttataggcttttcccgtactatccacgtaagagaaataaggctttccgtatagtccgtcatcccgcttactggcaaagacaaaccaatggctgttagaggaccaactatggtaggtatccgatttatcggagttgacggcaggtaaggtatctatcttcccggtctggaggttcatcatatgcaggtctgtttctcggtgccagatcgggaaggttccataatcggctaccgtgaaaagtaggtatttaccgtcgggcgatatcttgggatggcaggcggagccattatgcttctgggcatcccatacggtttcgatctgtcggccccattccttggtatctttatggaaagatatgcggcatagggaatattttaggttatggatgctatcgggcaacggctggatgggagcggagcaataatagatccagttcccatcgggcgaaaaggtagggaaggtctctaactcatccttccggctagtcaatggggaggtgatgagttgtttctttctgaaatcggcgaccactaggtcggaggttgtgtcatagacttccaaccgcttacttcctaacgaatgaaaagcagggatgataatattcgtggaaaaaacggcgaactgccccgatggatggaaatcgccatagacagccccattcggcagactgtcgttgctcaatttcaacttcctcaaatgtccgttacggttcagcagggtgcctccttgctttccccgtaaatggaacatggataaacttcctttcttatttccgtaaatatggcagttcatgcaagaaccgtcggtatctttgttgtcggcaataacccgttcctcgaaggtattgatctcccgctcgcataattggatcttgttccatacctcgtagccgggttctataagccggtagcttatgtaactatccagtttctccggaactacttgccagtagaaagaggggtaacgaaaccatttacccttgatacgggcgactacggttatttgcaggcggttgcccacttcctgctctaaaaggctttcccataggtttaaagggaaaatagctttctttccgaaagataattgtatctcttttgatttcccttttaaggttacttgcatagcgtccgcatcgtttctcaataagaagttgagaggggcaatattcgtgggaatcatgatatccgtataatcgggatacatggggattgggtctgtggtatcctctatttgcttcggggtaggggtacatcctgccagcaagcagattatccagacgaggtaataggttatgttctctttcatgattcttgcttctttcatggcttactctcctttccgggctctgtggtcgcaaaatgataatagaaccaataggtcttgccgtatttctctttcaaactcgtgtcctttgcctcataaagccgggtataatcggcgaattctttcgctatctttaccgggatttggtattttataagctcttccgcacggatattaccttggcgggcgagatggatcagcagggcctcggcgaaaatggaactagagaccttacccggtacataatcttctacaaaagaacggagatctttagagagtaaatgatagcagagtaagtattcgtaagcacggagattgccggcgttcgaggcgactaagttccgtaaggaagtcacggcatcgttaccggaacgtagatggtcttgggtcgggatgtctctgcgtttcttctccagccactcctttactcgcggggtttgctgaccgggtattctcttttcggcccagcttttatgaaggagtgtcttgtctaatatacgtagatatttaagagctgcctcatcatccccattgaccagattgatctcagccagccgtttgatcatacggctacccgaattgcggggagagaagatcatacttagcatggcgcaatgctcggccatggtcatatctcctaacgtaaaccataactcgttagcgaataggatagagagaaaagaagcggatgggttcacggggaggatcaacccattcgtacccggttgattccacgctaggaggttccgggagagagatacgggtgagttgatctcggacggatgcgtggcattgtacaggttccggtaataggtcacccaaaggatttggcggtctgtctcgagatgtttcctcatcttttgtatatttccgaaataatgttccacatcgaggctgagtacatactcccggtcgagatccggcttactccaccaagtggtagcgggatattgggtcgctggaagaagtaatatacctgccgcaagcagggcacttagcttttgatggtgcgctatgattccggcggccagcataagggccagacagagccatgccccgtacccgaagcaccaatagcaaagaagcatggcgggaatgcaggtaagaagacgttgcccctcagtttggctccggctatataacaggaaaacaccttctgctccgatcaaggagagagtcgcggataacggataggcgagtccgcaagaccttccggcctcccataatacaagtagtatcataagaggaagggcgtatctcttgctgacgaattgccggaatgtctgataggtaagcagggcaaataaagttaagacaacgcttaggatgaacgggcctcccccgatataataaaagaattgcgtgaggaaatcgccggtgagacaagccagccacgcttcctcctgaaaatatccacggagaaactcgccgctgtacaagaacagcatcatttgctctttgtggaacaaatgataggggtacatccagaagaagaaagcgaagatcgctatcgccagtaccgctagcgtgatcgacagatcctgtttaatgattcgcttcatccagttcctttcgttgctcttcggtcaaggaggtttttatcatcttatagaggaatttcccgaccgtttggttgatatgttctttcatgaacgcataattaaaagcttgcgtctctactctcaaggaatcccatgtctgcttgatgcggatggaatctcccggcgagcaggtcttaagcgctgtccatagggcataggattcgccatcggtcttttgcttacggtctttccaatgttgcaaggcgtcgttttgcggtgtaccggaggccgagctgatggagtctatccgtactgaggtcacacccggttccgttacgaccagtagctcttggaacttgagacgcaaaaggatgcgcatacggaggactttcatctcttctcccgttccttggaaagtaaaccgtgcgttctctattctcgtagaatcgatattttcgattgaggcgttttccatgggtgccagataaatccattccccatcctgctgtgcggtgggtagggtgccttctatgatgtatttggaatcgttagattgacaggcaaataggcacaataaagtgaatactcctataaatagatatttcatcgatcgtgttcattagtaattagagactcaaagtttagactgcgtaaagttagtattttttcggaaaagggaatgatgtttttttgacaaagggtgatacttaatttacgtcgctgttggggaggaatggaaaaaaggaggacactaattcagacatcctccctttttatgaaataaagaacaattaagcgtttaggactttcttgaagcgacggataaattccttggcctcatccatcgtcaagcaaagcggaggaagcagacggatcgtatgggttccggctacgcccgtgaacactttctcctcaaagagaagtttgctacgtacttccttgatagattcctcgaactcgataccgatcatcaaaccacggccccgaatttccttgatacccggaagtttatgaagctcatccaataaataggcacccactttcgccgcgttatcaatcaaacgctcgtcttccataatatcgagaacggcgatagcggctgcgcaagccaaatggttaccgccgaaagtagtgccgagcataccataaaccggcttgaatttcgggctgatcaataacccacccatcgggaagccattggcgatacctttcgctaccgagatcaaatccggcttgataccggcatattgatgtgcgaagaatttaccgcttcttccatatccggattgaatctcatccaagatcagacaggcatcataagtcgtacacaggttgcgtaactcacgcataaaatcatccgttggcaattggatgccacctacaccttggataccttcgatgatcacggacgatacatcccccttcttcaactcttcctctacggcggaagcgtcgttcaatggaagataagtaaccgctagatcctcatttaccggagcgatgatcttcgggttatccgtgacacgaacggcggcggaggtacgtccatgaaaggcgtgcttgaatgcgatcacccgcttcttcccgttatgaaaagaggcgagctttaacgcgttctcgttcgcctccgctccggagttgatcaagaacaacgaataatcatcgtagccggaagccttccctagcttatccgctaatttttgttgcaagctattgataaccgagttcgagtaaaagcctaatttatttacctgctcggtaatcgcctttacgtaagtagggtggctgtgccccaccgagatcacggcatggccgccatataagtcgaggtactcgtttccctcgctatcccatacatgacatcccttgccttgtacgatctctatattaaataatggatatacgtcgaataaattcatctttatagtattttttaaaacgcggagggttttaagtgtaagccaaccgtctcctccaacccgaacaataagttcatgttgtggaccgcttggccgctagcacccttcaataagttatcgatcatagagataataagaagcttatcatctattttctgtaagtggatcaagcatttattcgtatttaccacttgtttcaaatccgggttcttatcagtgataaacgtgaagctgtgatcatcataatattcctcataaatacgtcggatctccaccaagtcaatcttgcaatcgatgtatgtcgtggcgaatataccacgggagaaattaccgcgtacggggatgaagttgatccggcttgaataactcttctgcaactggctcaagctctggttgatctcggccaagtgctgatgcgtaaaaggcttatagattgatatgttgtcgttgcgccagctaaagtgagaggtggaagaaggcttcacgcccgctcccgtagaacccgtgatggcattgacatgcaagtcggaattcagcatcaagtgcttcgccaacggcaatacgcccaattggatgcaagtagcgaaacaaccggggttcgctatatgccgggcgttgcaaattcggcggcggtttaattccggcaggccgtacacgaaatcgtgctccgggccttcgatccggtagtccatgctcaggtcgataatcttcacgttctcgggaaccgtgtggttctccatgaactttttcgtatcgccatgagcggtacagaagaacagaaggtcgatgctatctaacggcaactcgctggtgaacaccaaatccgtctcgccataaagaccaccatgcacgtccgtgatcttgttaccggcgttactgctactgtttataaatgtaagctcggcatcagggtggtttaggagcaggcggatcaattcacccgccgtgtaacccgctccgcctataattccgcatttaatcatatctcttcgtctttatggttcgtataataaacacgcaacggagtagaaagaaccttgatgaagcccttagcgtcctcggcggtccagcctttctgcatctctccgtactcaccgaatttcgtctttaccaagtcgtcctcagattctacgccaacggtagagaaggacaacggacgaagctccagaatagccgtaccgttcacgttacgctgagactcttgcaacatcgcctcgatatcgcgcatcaccggttccagatattggctctcgtgcaagaacatgccgtaccagttcgctacctgatccttccagtattgttgccatttgctcaacgtatatttctctaggaagcggtgcgccccgataatcaacataggagcggcagcctcgaaaccgacccggcccttgatgccgatgatcgtatcgcccacatgcatatcacggccgataccgtaagcggccccgatctcctcgatcttctggatagcggcgatcttatcctcgaacacctcaccattcacggcatgaacctcaccgttcttgaactcgatgcgcaattgctcgctgccggtcttctccacctgtttcaaatatgcgctctcgggcaatccttgcgcggaatcaagaatctcgccgccgcagatagaggttccccaaagacctacgttataggaatatttcaacttcgtgaaatcggcctcgaaaccgtgctccttcaagtagttgatctcttcctcgcggctcaaggccatatcgcgggtcaacgtgataatctccacgttcggagccaataccaagaaagtcatatcgaaacggatctggtcgttaccggctccggtagaaccatgggcgatagcgtcggcgccaatctcgtttgcgtagcgggcgatcgccaaggcttggaagatacgctcggagcttacggagatcggatacgtaccattacgcagcacgtttccgaaaatcatgtacttcaagctcttctcgtaatactctttcgtaacgtcgatcgtcacgtatttcgtggcgcctagcttataggcgttctcctcgttttgtttcaattgttcctcgctgaaaccacctgtgttagcgcaagcggcgtatacctcgtatcctttttctttagccagatacatgaccgtgaatgaggtatccaaacctccgctgaacgctactactactttcttcttcatcgtttctttattttatgttgtttttctatcgtattaatttagtcctttttagtctgattacgggcctcccgctctcgttgcgcacgatgcggatcggccgggtcgaacagcatggccgtgcagatgcaatacttacgttcggtgcgttccaagatatcgtggttcacgcaaccgttgcaaccccgccagaaagcctcatcgtccgtcaagtcggagaacgtaaccggtacatatcccagctcggtattcatcttcatcacggcagcgccggaggtaaggctgaatacctttgctttcggccagcgcatgcgggcaagctggaaggtcatgtctttgatgcgtttcgctatacccaagccccggaaatccggatgcacgatcaagccggaggtagtcacgtactgcttgtttccccatgactcgatataactaaacccggcgaactcgtttcccgccaaggcgatcaccgctttgccctctttcatcttctgggccacatactcgtgcgtacgtttggcgatacccgtgcccctgactttagcggcagactcgatcgtatctaggatcgtatccacatatacctcgtgagaggcatcagcgatcataacatcaatttctatttcttgttccattttattgtttgttcttagttttttccttttatataaaatgtgataaagcggcaatcaccttctcttggctcacaccgttgcgggggattaccaagatcgtatcgtctccggctatggtggccagtatctcgctgggggcatgggagtctatgtccgaggcgattcccatggcgtaacccggtcgtgttttcaccaccgctaagtttccggaaaactcgatattcggctttttcttgccttcaggctgtgcttgtttgcttatactctcttcgggaaggcgatatacataatctccgtttccgtcgtgtaccttggctactttcagttgcttgatgtcgcgggaaagcgtagcttgcgtaaccgagaatccgctatcttccaactctttaagcagttcttcttgattacttatcaccttcgtttgtataataccgcaaatggcatccaatcgttccttctttgtactcatgttgtatatttatgcaaaacaggctgcaaatataaagagtattattgaataaatatacaatcaagggcttttttttctgatataagtagggggtaagggattttcctgcttagcttaggtttaatcactgtaagtgttaggcatttcatctatttatattcgtcttctatcagccattggatgatcatgcaacagctgttagaagatcatctaccaattggtggatgatcatgcaacggatgatagatgatgaatgtcattcaaaggaaaggctaatacttcctatagaaagaacgaaagggtgtggtcgttttgaacaaaatggtagtatctttgcgttattaaaaagagagtatcaggtttaatttcaagtaaaaggatatgagaaaaatagcaagtttattcgtggccttgcttttattggcaggctgttccagcgtaccgttgacaggacgtaagcaagtgctgttggtttcggaccaagaggtgttatcgtccagccttacccagtataacgattatataaagacggcgaaaaaatcgacgaacgtgaacaagagcgctatggtaacccgggtcggaaagaagatagccgccgctacggaggactatttgcgggcgaacgggatggcggatgaggtaaaaaacttctcttgggagtttaatttggtgaatgatccgcaggtgaacgccttctgtatgccaggcggcaagatcgtggtgtacgagggattgctgccattggtttcctcggacgatgaattggcggtagtcatcgggcatgaggtcgcccatgccgtagctaaacacagcaatgagcgtatgagccagcaactaatggcccaatacggggcggctattttaggtgcggccgtaagcaataagagtgcggcggtacagcaagcggccaatacggtatatggtgtgggagcgcagtatggcgtaatgcttcctttctcccgtaagcacgagtcggaagcggattatatgggattggtattcatgactatggcgggatacaatccggacgtggcagtcaacttctggcaaaagatgtccgccggaaagagtggctctacgccggaatttatgagtacgcaccccagtgatgccactcgtatagcggaaatccaaaaagtcctacccgcaatcaaaaccaaatacaaaaagtagttggcagttgacaagtgacagttattttatcacttgtctcaattttcaattaaacaagattcccatcttgttcattaagaaacaagcattcatattctgggctattccttctcttagttgataagagaaggatagctcctcgtcttttatatccgcttcgaagcggtaattctttatttgttccgggaactcttcctccaaagtacccaacactaaatcgtgggtggcgatgatgccgcaagccttataagcgaccagctgtttcataagggcaagagagcctttctgcttgtcgatagaatttgttcccttcaagatctcgtccaagatgataaatagcttctccccgttttgcagcctgtcgataatcattttcagccgtttcaactccgcgaagaaataagactcgttgctagccaaggaatccgaggtacgcaagctggtaaccatgtgggcgggataaaccgtcaaggaggcggcgcagaccggagcgcctacgcaagccaataagtaattgacaccgatcgtccggaggtatgtactttttccggccatattcgctccggtgataatcaggaaccaaggacttttgcggatatcgatatcgttctttacgcagacatcccggttcaaaagaggatgtcccaaagccttgccttccatctggaaataagtgtcggcaatctccggatagatgtattccggatggttgaaagcgaaaccacccaacgagttcagcgcgtcgaaacgagccagcgcgtcgaaccaaagcggaagtttatcggagtaagtctgaatccagcgttccaaaaggatggcatggcgtgtatcccgcaagtagaaaagattgaaaatgatacccgccaaactgaatcgttggtctaatcctccgatatacgacgacaagcgtttgatagcatgcgaggccaattccttctcattcgctaattgtccgctgatctctttcagctcttccgactggaaattatcttcttccacacattgcatcagctttgagtaccgattgaaaatagactccatcttattgacggtcgcgtaaagcgcattgatttccttggctcgtccgtaagcgatcactaacgtgattaagaaataaatattcaataaactcccgctgatccaatccagtgagtaagcgatacccaatacgatccacaacactgggaccgcccagatcaatagtttccacggtaggctatcaacgaatttatgcttacgctgagtgagtcggtccataaagttgatatcgttgtctctcgtatcttgcgtgtcctgccggatgattcccgtcacatagaaatgctgccgtaaggcggataaagtcgctaattccttgacagcctcttgccgtttgacgatctccttcttatccgtcaagggattcgagagccaaccggccagtcgttcccgcccgaacccggttacggtacgattgagcgattgaaacaaggagcggtctccaaacacatccagatccaagcagaaagagtgctcgcccgagatcttatcggctgccccgtcgaacgcgctgaaatcatagtccagtccttttagctcatcctcgttcagtttgatcaaggtctcggcgtatacttttcgtgcgtacattttattatggtaccacatcaggagcgcgaacgggatgatataagcgaaggtgatccccgtcaggcattgccaactctcatccctgaatatccataaggagaggatcgctcctgccactaaagccaaccggatactccccatcaaatggatcttctttttcaaattacccaagcgccgtgtataagcgtcgatattttctttataataactatagatttcttccatagccgcgaatataggaaaaatgaactaacctcttgaattttggtttatatattatattcataggtgaaatgaccattattcatgtaatttgggcgataaagccaactgccgtttcccctatattcgcggacacatttataatttaagatcatttatgaaaaaaacgattatatcctttctcttccttcttgtttgcggtatggcacattcgcaagttttagcgaaagggccggaagagagttataatgcggatagtattcgtgcgattttggataagtcaccttattttaccttattcaaggacaattattttattggcggtatccctatcggcaacaagcctacggcgagaaactccgacgttaaattccagttgagcatcgcccaacgtcttacgaaaagtaaactccccttcgatacctatcttttcttgcaatacacgcaaaaggctttttggaatgtctttcaagagtccttgccgatgcgcgacttgaattttaatccgggtatcggtttggggcaccttatcgtgcataagaataaatatatcgggaaaggctatttgatggtcgagcacgagtcgaacggtaaagatagcatcttctcccgaagttggaacaagatcaccctagcggcggctgtcctgttgaataagaactgggaagttcaattcaagggctggataccgatcgtggatggcaaggaaaataaagacatccttaaatataatggtatattccaagtagccgccaattaccggacagacaacaggcgctttaactgcggggttatcttgaccaaacgaaagacttggttcagctttaacactcagatcgagttgagctataagtttaataataacgagaaccaatatttcttcctgcaatattataatggttacggtgagaaccttttggaatacaatcaatacaaaagcatgctgcggatcggtttcgtgatcaagccgcaagatttcagtatttactaaaaaatatccttcttgatagatctcattgatcgggcgatagatgtaatatatgatacatttcgtttctttaggaaacaatacatttacagactttgttttctaatatattgaacgtttcccggataattaaagagatacgccatgaaggaaaaaattgaacaattaaaagctcttaaccacaaagctgagttagggggcggagaagaccgcattgcgaagcaacatgcggcaggtaaactaaccgctagagaaagaatcgaactactattggaaaaaggtagtttcgtggaaatcgacaagttcgtgacacatacgtgccatgagttcggtttagaaaaacagcgtccattgggagatggcgtggtcaccggttacggaatgatcgggcaacgcacggtatttgttttcgctcaggacttcacggtattcggtggagccttgtctgagacgtatgcccgtaagatctgtaagatcatggacatggcaacggaactaggcgctccggtgatcgggttgaacgattcgggaggcgcacgtattcaagaaggagttcgttccttggcgggatacgccgagatattcctccggaactcgttggcttcgggcgtgatcccgcagattagcgctattatgggcccgtgtgcgggtggagcggtttactcgccggcgttgacggactttatctttatggtaaaacaaacgagctatatgtttatcaccggcccggaggtcgtgaaaagcgtgacgcaagaagaggttacgatggagaatctgggaggctcggaagtgcatagtacccgttccggagtggctcattgcacggcggataacgatatggattgtatcttgaagatacgtgagttgatgtcgttcttgccgaataataatatggaagagccgccattcgttcctactaccgatagcccgaaccgcatcgatccgcaattggatctgctggttcctactaatcccaaccagccgtacgacatgaaagaactgatcctttccgtggctgatgatcaaaacttcttcgagatacaagaggaatatgccaagaacatcattatcggttatatccgtttgaatggaaagacgatcggtgtcgtggcgaatcaacctgccgcgttggccggtacgctggatatcaacgcgtccgtaaaggcggcccgtttcgtccgtttctgcgacgcgtttaatataccgttgttgacgctggtggatgtaccgggtttcttgccgggcgtgaaccaagagtacgaggggattatccgtcatggcgctaagttattgtacgcatattgcgaggctaccgtgccgaaagtgaccgtcattacccgaaaggcttatggcggcgcttacgacgtgatgagctccaagcatatccggggcgatatcaacttcgcttatccaaccgccgagatcgctgtcatgggaccggatggtgccgtgaatatcttgttccgtaaggatttgaagaccgcggaagatcccgaaggcaaacggaaggaattgcaagccgattaccgggagaagttcgctaacccgtaccgggccgctgagttaggctatgtagacgagatcatcgagccgtctatcacacgcagccgcttgatccgtagttttgagttgctggccaacaaacggcaatccaatcctccgaagaagcattccaatattcctctttaaaaacgaatccttatgataaagaaagtattagtagccaatcgtggcgagatagcgatgcggatattccgcacctgccgggtgatgaacatcccgaccgtagcgatctatacgcatgtggatcgcggagcattacatgtacgttatgcggaggaagcctactgcatctcggaagatgaagcggatacctcttacttgaagccggacttgatccttgagatcgccaagaagacaggagccgccattcatccgggttacggctttttgtcggagaacgccgacttcgcccgtcgttgcgaggaggagggcgtgatctttatcggcccgagcgccgacgtgatcgcgaagatgggtatcaagaccgaggcccgtaagatcatgaaagaagccggtgtgccggttgtacccggaacggaaaagccggtgacggacatagaggatgccaagaaagtagccgccgaggtgggttatccgattatgctaaaggcgcttgccggaggcggtggaaagggtatgcgtttggtacatagcgaggatgagatggaagcggctttccgtatgtctcgttccgaggcggccaactcgttcggaaacgatgccatctatatcgagaagtatatcgagaacccccatcatatcgaggtgcaggtactcggggataaatatgggaacgtgatccatctgtatgagcgtgagtgctctatccagcgccgtaaccagaaagtgatcgaggaagcgccctctccattcgtgaaggaggccgctcgccagaagatgttggccgtagcggtggaggcttgcaagaaaatcggttactacagtgccgggacgttggagttcatgatggataaggaccagaacttctatttcctcgagatgaatacccgccttcaagtggagcatctggtgacggaggagacaacgggcgtggacttggttcgcgatatgatcttggtggccgcaggaaatcgtctgccttataagcaggaagatgtggcttgccgggggcatgccttggaatgccgtatctatgcggaggacccggaaaataactttatgccctctccgggcgtgatcaaggtgcgtgaggctcccgagggacgtaacgtgcgtctggatagcgccgcttacgccggtttcgaggtgtccttgcattacgatccgatgatcgccaagctttgcacatggggccggacccgtgagtccgccatctcgaatatgatacgtgccttgcgggaatacaagatcttgggaatcaagacaacgattcccttccacctgcgtgtgttgcataacgcgaccttcttgaaggggaattacgatacgacctttatcgacaccaagttcgataaggaagacttgaaacgtcgccagaacagcgatccgaccgtagccgtgatcgccgccgccttgaagcattacgaggaggagaaagaggcggccgcccgtgcgacgaccgttccgctggtaggggagtccctgtggaaacactacgggaagttacaaatgttagccaataacttttaatgagaggaggaatgattatgtcaaaggctttagcgacttattttgccacggttaacgatattcccgacacagagttcaaggtagagattctggaagacgggcctatcaagaaagtatccgtaaacggtaccgtttatgatgtagattacaatctgggcggagatacgatccactcgatcatcatgaaccataaatctcatggcgtacaaatatccagtgttggagattccacctatgaggtaaagaataaaggtgattatttccaagtacaggtgattgacgagttgaagaaattacgcctgtcgagaaccagttccaagacggtcggccgtcaggtcatacaggcccagatgccgggcgtgatccagaaggtatatgtcaaggtaggcgatgaggtcaaggcgggagacccgctttgcgtattggttgccatgaagatggagaacgagattcgtacgccgatcgatggggtggtgaaagaggtgtatgtcaatgagacggacaaggtctccgtgggtgataagatgttggttgtagagtgagttgtctcggggttatagttttccctcgagagaataggaaaggaatcggagcagtccggttcctttcgcatgtttggtaaaattatcttaaaaaacattccgtctttctatcgtgttacagagttattatttctacatttgtagcgtttaaacctaaatcatgaagttatgttgacagcaatggtcattgtgttccttgtcggttatttgatgatcgcattggaacatcctctaaagataaacaaggcgggaacggctttgcttatcggtacggtcttatgggttatgtacacgtatgcggccccgtttttcatcccgagggcctcggcagaggaattcagcttgttcttggaatcgttcccctctttggggtctttaacgtttaaggaacaatgtacccggttcgtcgtggagcatcaggttctggatagtatcggagagatcgccgagacgcttatattcctgatcggggcgatgataaccgtggagctgatcgatgcccatggcggtttcatgtttatcacgaatcatattaccacgaagaaaaagaagaaactgctggcgttgatcgccgtgatcacgttctttatgtcggccgtgttggacaaccttaccacctcgatcgtcatgatcatgttgatccgtaagttgctcgggaattataaagagcggtgggtgttcggcagtatcattattatagcggcgaatagcggtggcgcttggtcaccgatcggcgacgtgactacgatcatgctttgggtaaggggaaatatctccacctcatccacgatcccccatttgatcctgccgagtatcgtatcggcgttgatcccggtcttgatcgccatgcgtttcttgcatggcaacgtgacgccccctaacgcattctcgcaaatggaggcggacaatgagttgctgaagaaattgaaggataaggagaagttatcgatcttgatcatcggtgtgttgtgtttattgttcgtgcctgtattcaagacggttactcatcttcccccgtttatgggtatcttgatgggagtgggtattctttggttctatacggagatgctatacgcccgtaaaccgatcgacgaggacttgaaattgcgcttgtccaaggtggttcaccgtatagacggggcgaccttgttattcttcctcggaatccttttggcggtggatgccttgcgttgcagcggcgtattgtcggatttcgctttctggctggacgatacggtaggcaatgtgtatgcggtgaacctgattatcggcgccttatcgtctatcgtggataatgttccgttggtagcgggtgctatcggtatgtacccggtggctacggacgctatggtggctgcggcgactgatccggcttatctggcgaacttcatgcaagacggcgtgttctggcagttcttggcttattgcgcaggagtaggtggaagtatgttgatcatcggttccgccgccggagtcgtcgtgatgggcctggagcggatcaatttcatttggtacttgaagaatatctcgctgctggccttggcgggatatttgtctggtgcggtggtatatattctccagaatttgatattataataagtgtatgatattaattgcggatagcggatctacaaagacggagtggtgcctggcggatcaaggcagaccggtgcgtacggtcgtgacggcgggtatcaatcccttcttccagacacgggaggagatcgccggagaaatccgggatgccttattgcccgccttgaagggtgagcggatcgatgccatttacttctatggcgccggttgcgccttcccggagaagaaccggatcgtggaagaggcgattacgccttatatcccggctcccatagaggtgtatagtgacttgatggcggctgctcgtgccttatgcgggagccgtccgggaatcgcctgtatattggggacgggatcgaattcttgtctgtatgacgggacggagataacggagcatatctctcccttgggattcattctgggggatgagggtagtggcgccgtgctcgggaagttattggtaggggattgcttgaagcgtcagttgccggcgcctttggttcggaagtttatggatcaatatgagttgacgcccgccttattgttggagcgggtatataaacaacctttcccgaatcgtttcttggctaccttatcccgtttcttgttggagaatatcaccgagcaaccgatttataatttggtctatacgagtttccgtagctttttcctccgtaacgtggcgttatatccgggagctgatacgtacccgattcatttcgtaggctctatcgcctattattatcaggaggtattgaaagctgcggccttatccttagacttgaaggtcggtacggtcgtacaggctcccatgaacggattgatccggtatcattttacgaacgaagaaaaaaatgaatgagttatggcatttcaaaagataaccgagtcggaatcgttgtacgataatctggatcagatgtctgtccgggagttgctggaaggcatcaataacgaggaccggaaagtggcgatcgccgttggccgggagatcccgaagatcgagaagctggtaacccgtatcgtagagcggatgcggagaggcggcaggctcttctatatcggggcgggtacgagtggtcgcttgggtgtcttggacgcctccgagatccctcccacgtacggtatgccgaataccttggtgatcggtttgatcgccggcggtgaccgggcgctccggaatcccgtggagtcggcggaagacgatctggataaggcttgggaggaacttcaacaatatcatatcaatacgaatgacaccttggtggggatagccgcctcgggtacgactccctacgtgatcggcgccctgcgtaaggcgcgctccgggggaatcctgacggcctctatctcctgcaacccggactctccgatggcggcggaggcggagatcgccatcgagccgatagtaggtccggagttcgtcaccggaagtacgcggatgaagagcggtacggcccagaagatggtgctgaatatgatcacgacctccacgatgatcaagcttggccgggtgaaggggaaccggatggtgaacatgcaactgaccaaccaaaaattggtggaccgtggcacccgtatgatcatggaagagcttcgtctggattacgagcagagcaagaacctcctgctcctacatggctccgtccgggaggcgatcgattcttatcaccgtgaatggcggctgaatcaataaataattcctatctttcggggtaaaacctaaaagatcgttgattatgatgtgggatttcatactaagacttttcgtggcaggtattctgggcgccgttgtcggactagaccgtgagtaccgtgcgaaggaggcgggttaccggactcacttccttgtttcgttgggtagcgcgttgatcatggttgtctcccaatatggcttccaagatgtcatcctagagaatagcgtaagtctcgatccgagccgtgtggccgcccaagtggtgagtggcatcggtttcatcggggcgggtacgatcatcatccagaaacaattcgtgcggggattgactaccgccgccggtatctgggcgaccgccggtatcggtctggccgtcggctcaggcatgtacgggctcggtatcgccgccactttgttgacgctcgccgggctggagctgttgagcgttatttttaaaagcatcgggatgcgaagttccttggtggtattctctacctccgacaaggaggcgatcaaccggatcgcccgtgttatctacgagaaaggtttcctgttggtaagctatgacatgaaaagactggggcatcaggagaaggacgagtacgtcgtcagcatcgtgttgaaagcccgtaaaaacacggaggaaagtccactgttgctattgatggagcaatttccggaggttacggtggagagaattgaatagttattctgtattggcggtaagttttcgtatattcgcggctcgaaactatttaataatcgtacgatgaattttatttctaagctattcaagaagaacgtatctgaggcggaagaggccggcaaaggttccgtggaggagttcgtatctttaatccgtgtatattatcaagccgttatggccgtgaacttgggtatcaccaacttgaacatgctcgccgatatggctttgttcaaacgcatgttgaagataccgacccagaataacaaattgggtgtcgccgagaaatcccgtgtgcgcaaggtgttgatggaggattacggcctaagcgaggctttcttcaaggagatcgacagctcggtgaagaagaactgcaagaaccagaacgatatcaagacgtatttcttcatgttccaaggtttctgcaatgacttgttcaacttgcttggcaatctgatgcagtggaagttccgcttctccatgctggtgaagaagttgctgtataatatgacgacgaagacggttcacgatatcttgaccaagtccgagtggaaggatatcagcgtgcagaaggccgcatggagcgtgcgtaagtatgccgagaaactaggctactccgagcaatggatcacggacttcgtgtataacgtcgtgcttctggcgaaagaggatcagaagaaggaactcaaaaagagcaaggaagcatgaccaccgagctgcatccgctaggtttcttcctcccggagaatacgagattgctgatgctgggaagttttccgcctccaagagctcgttggagcatggatttttattacccgaatatccagaatgatatgtggcgcatccttggcttgattttctatgggaacaaggatgcgttcctgcgagacaagaaggcgttcagcgaggagaaggcgaaggctttctgccgggaaaaggggatcgggatcggtgataccgccatggaggtgatccgcttgaaagcaaatgcctccgataagttccttgaggtggtacggccgatcgatccggaaaaggtcttgtcccagataccggaatgcgtggcgatcgtggtaaccgggcagaaagcgatggataccctcctctccgtattgcccggcacggaggagccgaaagtgggcttctcgtcggaattttcttgtatgggaaggacgatgaggctgttccgtatgccttcatcctctagagcttatccgaggccgttggaggagaaggccgccgtttaccgggggatgtttgagacgttggggatggtgtgaggcaagtctgccatacagcattcctcgtttacgccccacctcttcaaggagtgcggtaagctcggaaacgtcctatctgaatgatgtccaattatctctttcgtgtatatacatattttaagtacttgatgcgacattagaacaggagaaacgctgcgatatttgcgacgttattcagtttaaaacgtccgattatggagtttaatgcacgaacttattttcagtaaggtacagttgtagcatcttatcgccgtaagatgtatgatcttactgttgtaggatgtatgatcttaccgttgtaagatgtatcatctttcacggatacttgacatctccttgtcttgcgtcttttagcaaagtgacagtttgtaaatttaagtcatggagaatcgattctttcgggtaaaggtaaggtatgctcccgaaaacgaaagaaaaaaacgacaatcgattggttgataggctaatgttgaataacggccttttattctagcggaatttattcatcgtatttcatgttttgggggcaggaagggaagaaaaacggtgctacaatagggttataacagggtaagaatgcccattcgcgactactcataaccctattcttgactacttacgatgcccaacggcagtatcggcgttgcctaatacgactagttacgcaggcttccggcacctattgtgtgtggaaaacgctgtattttaacaaaaaggggtgcttattgctactgctttctcgctatttcgctaggttcggaaaataggtgtgtcaaggtaaatgctctatggaaatcaaaaagatggccggagagcggtttggttgacggaaggatatttgcagggcgagtaccgtgtaagataaaaagagaggagacggaacgataaacgctccgcccctcttatataacaagaatgaatgaattattgggataatctcatcataaaatattgctagtgagatacatcttcttcatttatccgatcagagatactcaatgtcacggagaacattgagtatcgtgatattcatttttagatcaattatttacgtaaaatccaatatgcccagttgcgccgctaaaagttatgacagatcctacttgaactgtagatccattacaagagactctatatcccttatctatggaaacaactttatactttccatgttcaacaaagtaaacccatggacctccactataaaaaccactggtgatagtatattccatgaaattttgatcttcaataaccattgatatatgggcgtcctgattttgagctgtaacgtacatttttgaatacccttctctttctgcggcataggaaggtgatggaccatttacgtcagcattgatattaataacagttgttgttaatagtgcaatatagaatgaataatactttcttcatgatatattttctttattttcttgttttaaaattccagaaccaagcctctccccaatcacctgcgccgggtttcggagccgctagtttaagatgctcaccatccgcttccaagatgtgatattcatattgaggagcgaaggtatcatcagtgtctcccattttcaccagtcctaataaaggaatggttccggtgaacgttaatgtaccttgatcccaaccttctttggctacagcggataagtcccatgcgattgttccggattgaccgcggctggtttctactttcttgccagccaaggtaaaagtcatccaaccttctaacccatctttggcatatcctttctcagtacattgttggtcgatgtctgtggcttgaacttgccaccattccggacctgtgctttccatataagcaccatttccccaaaggccgttgctggcatctgtatcccaaacccaagttacagaattatactccggtccgaataatccttcataaatagaaggcacatccacatactcggagatcgtcacatcgttagagaaagaggtgatggagccgtcttggttcatagcccggacggtcaagctcgtgaggggaggagtgccaatgatggaaccctcggttccggtggctaggatggccccgtcttgatccaatacctgtaccgtcagtgtgggattggtggagaaggtgaacttgttttgtccggccgtcgtttgcgtaagcgctacacgggcttgcagatccgcctcggttaagttggcggatatgcccggatcactttctgtgattgggtcgcaggaaaccatcattcctgcgatcaatgccattgctatataatatatattctttatcatgattgtatattctgaattaaaaggttattaattagtccagccattgtactcggcgtccgctccccaaccttcgttctgctggagttcactggagagtgagatctggctctcaggtatcttcatgaaaccggcggaggtgttgtagcgggaggcgtaaccaccattttgcgccttgttcgtggcaggattacctgcgatgtagataggcgtacctatctgtttctgcaaggcagcggcggcaatgtgccagcggcggatgtcgttccaacgggtaccctccaaagctaattcccaacggcgctcgttttgcagagcttggagcgagtagccgatagccggaaggccggcacgctcccgcaccttattcataccggtggcatctcccttgagctcggattgcatcaagagaacgtcagcgaagcggatcaataccaagtcgtggatgttgtccaaggcttggttattcgcgccttgcgtccagccatcgattccgtacatctcgttctcgaaggtcttgaagtagccactctcgtcattggatgtcttgcatgcgacaggagaccatttcatggcatagtagtccgtttcctgtacgaagtccgcccaaccgcctttgttataagcgggtaatttgtctgtacgatatacggaagcgtcgcgacgcatgtcatttggttctgcgcttgcccaatcgttcacgaaattcggtgctacaggcccggctccccaaccttgtccgaaggggaaggtatttgctacgtcttgatctccgcgaagaccgaaatgaagcgcgtaaccattggcgaaagcgatggtagtattccaactggccagcttattgaacttgatggcgaacatagattccgggttgacggcgttatcatcctctacccatttcaatccttttccggcggtgtattcgaaatcgttcaccgtgcaacggttcgtgtaagcccaaaggctacggaagtcggatgctaaggaatatccggaattgttcacgcaatcatcgatataagagatcacttgatccttcgttagggtagagccgtcggccaaggtgacggaggtcagcgggttgtaagtggcgctggtcaaggcggctatatcttcgccattcccgtacatgccggtgtagaacaaccaagcacggcctaacatggcctcggcggtgtacttgtcgacgtgtcctgcctcaagggatgacgtacctccacgccatgcgggcatgatgtcggcggctgtcttaaggtctagcaagatctgtccccagatctcggcggggcttgcctgtggcacgtcgcttgtctgggatgtagtgattaggggtacacgattgtacatcgaggctagctcgtagtagaaataggcacgcatgaagagagcctcgcccatcaattggttacgtgcttccgtggaaggaaagtccggacagttatctaaggtctctatggcgctgttggcacggaatacgccggcataacggtctttccagaactggcgggtcatgtcggactgatagttgcagagcaggtccatggcctgcatcagcttgtcgttcgagccgcccccgcctagtgcgtcatcgctggctagttgggcgtaataaaggaacgatctctcggggttggcgcaaacggatgccatgctggcgtaaacgcctgctatcatttgctgggcatcgtcgtacgactccgggaatgtagcggttgtcttctctgtgtaattggtcgtgtcgagcatgtcctcacaacttgagaaggctacggcagcgcccatacatattgcatatattaactttttcatgttgcttttctcttaaaatttaatgttaacacctaccatataagttctgggtgaaggataagaacctaagtcgatacctcttgcccaaggattgtcctcgcgataactatcgttcgtaccgatttcggggtccatacccttgtatcccgtgaaggtgaagaggttctgggcgcttacgtacagacgtaattgcggcagtgggcagttcttccataggttcttgaagtcgtagcccaaagtaacgttctggatgcggaaatagctagcgtcttccacgaagatatcggatatctgttggaagttgacacctgtgttacccggaaccagacgaggataacgattggaggttccctcaccgtgccagtactcaaatacctcggaggtgtaattctccacgttgccgtcggtaaacttacgataagagcgcatattttgttgtccgaaggccccataggtggttaccgctaaatcgaatcctttgtaaccaacgttgaagcttagacccatcgtgatatccgggtgcgggttgccgacttcggtcttgtcgtcctcgttgatcacgccgtcgccattcacgtctacgaatttcaagtcacccggttggatggagctaccttgcagggagttggctgcgttgcctttacagttcttatccagataagcctgcacgtcgtcggcgttttgcatgacaccttccgttttataggcccagaaataaccgatcgggtgtcctacttccatacgggatacaggacgtgtgttctcggccagtaccttgtccggacctaggatgtaaccgtctttgttgttgatctgcgtaacctcgttcttgttatgggcaaggtttaggttcacgccatacgtccagtcgcccttctggtcgttccagcctaagccgatctcgacacctttattttccacggtaccgccgttgatatagggagcgttcgttccgtaagagtctaggatcggggcaacgatcaacaggtccttggttttcttgttgtaccaatcgaagttcaagctcaatcggccgcttaggaaacgggcatccagaccaaggtctaactgctcggaagtctcccatgtcacgtcctcgttcggcatgatgctggcataaccgccttgcgtggccgtacccttgttgttgccgaaggaatattgtccgaggtggtcgaacgctacggtcgagaaatattggaagttatcgatattacagttaccgttctgaccccagctggcacggatcttcaagaagtccatccagtcgtgcgtgctttccatgaaatcttcattgctcacgacccaaccagccgatacggaagggaatgtaccccagcgtttaccacgggcgaagttcgaggaaccatccgtacgtaagatcacgctagccatgtatttctcgttgaagttatagttgatacgtccgaagaatgacgctaaggcgttatcccctgtcggatatcctttggctgaggtaggctgagaagccatgctattgctgatataagcccggtcccagtcggagaacagaaggtcgttcgccgttgcctccagatactcacccataccgaaaccgctcttcttgaaggattgaccgactaatacatcgaagttgtgtttctcgatgttgaaggtgtagctaagcgtattctcgatctgccagtcccaaccagtcgtcatgttctgggtaacctcattggttagtttttgatcggtagaggttagtttataagccggactgtagccacggtaagagctggagttctgtttgtagctgacctgtcctttatagacgagtcccttgattggttgtaccttcaagtagccaaccatagttaatccgtagtttttgctcttgttgtttccacgggaggagttgaccattgcggcgatcgggttactcgtataagagttgtagttgaaccaaccggccttgttcaagtcgtcatacatatagtaatccccgttctcgttatagataggaaccagcgggttggcacgtaacatccaagagatgtcgttaccgtattgattaccctcggagataccggaagattcattatgattatagtacaggttttctccgaatgtgatgatatccaagtcaccctctttccacaaaatatgttcagagttcatgcgaaccgtgaaacgttggtagtcggaagcgaccggcttgcctagcgtaccttcctgtttcgtgtaggatacacccgtggagaatttggagcgttccgtaccaccggccaagttcaaggagtggctggtagtaatggcgttcttgttgcggattgcgtcaagccagttggtaccctcatcctcgccgctcatgtaacggttgtactgttcttgtgacatgtaattcgtccacgtgtaaggttggttacccgtgttgaagttcagttggtccatgactgccatgtattcctttgcattcagcaagtccggcatcttatatacgttctggaaacctacatagccgtcgtaactaacctgtaatttaccctgtttgccctgctttgtcgtgatcaatacaacaccgttggccgcacgtgaaccgtagatcgcggcggaagcggcatctttcaatacgtccaagctctcgatatcggcgggacttaaggaattgatgtcgccttcgacgccatcaataatgtatagcggagtcgtgctgccgttcgttccggcaccacgaatgttgatatcgaaactcttacccggctggccggagttcgctacgatattgacgcccgggctttggctctgcaaggcacctagcgggtttgtcgtgtttaatttttggatattctctccctttacttgaagggtagcacctgtcaccaactttttcttttgtacaccataacctactaccactacctcgtccaaactctgtgagtcctctttcaaggtgatctgtaagtcggatgtttgggcggttacgggaatctcttgggtcatataaccgatgtaggagatctctatgatagagccgggggcggcctctaagctgaacttaccatccaaatcggttatcactccgtttgtcgttccctttacgataacattggcaccgatgacttccattcctgttgcgtctttcacggtaccagtgattctttttgtttgttgcatgacttccatcgaagtactaggggcggctaacatttgtggtatgccacctagctggaaggccatacatgcgcctaaaaacagcgtcgttttcttaattgttgaattcattattttttacattaaatcatataaggctaaactaaaattcatttactcaatagggtcattagcggttaactgctaaaaacattagattttcggtccttcctcataggcaattgttttttgttgttaatatgtattgttaatttctgtcgcaaaattacgtcggatcccaagtgcgttcaaatactattttatccaagaataatacttttttgccggagtgtatttttaacacatcgatggggtagccgtaggcatgaaagcctttgtgactggtcgcaaagatagatgtgtgaaggaaaagagaaggggggattttgtatagaaatagggggggatatgtatttatccctgttaaaaaggtctcttatacaatgatttttgtctttttgtagttatcccggaactctttgggagagcagtttttctttttcttaaagatacggttgaagttcgagaggttattgaagccgcagtcataacaaatctccgcgatggatcgttgcgtgtccaccagcatgcgggcggcgtaaccgatacggatatcggtgatatagtcggagagggtcttcccggtcctcaacttgaagaaacggctgaaagcggaaggggccatacctacgagttccgccagttggtttaggcggatatcctgttggtatcgttcgttaatgtaattttgtactttctggatacgacggctctcggaatggatatctgttattttagcgaatgaggagctggccaatactttgtagttctcctcgacagaaagctcatataagatggttaagaagttgatgaccgcataaaagctttgctcctcggaaaccagcttttccagtaaatggtaaaccttcaggatggaagacatcgggaaactgatgccgcattgggctttctccaacattttccggatactgttgaattggtttttctccaatagattcttcccgaagagatcgggagagaactggatcgtgatctcatggatcaaaggcgatttacatgcgttctgctcccagacatgctccagttctttcccggttatcaatactaactcgtattctccgatcacttccgcagagtcaccgaccacacgccttacccccggagcgtgctcaatgaaattgagctcgtactccgagtggcaatggatcggataggtaaattctgtcttacgccggtctacgatgtaaaagcagtccttttccgatagtggggttatctcgcggataatgtccattctctgttgacaatttagttagtgagcctcggtcagctctatgaccttgctatgggcatgagccgtagagaacacgttcattcctattttcatcaagaaatctccgctgaaggtacctccgtcggtaaccaaggtcgatttctggcccggcatgaggtttatctcttgtaccttatatttcttattcgggtccaatccttgtagctttacggggaaagtcttttctccgaagcgagggtggatatcataagcgaataggacggatttgctttttgccttatccacgtacatcacggatgaatggttggtatcgtaaggggagactagacggtacagatcgccgtcgaggatcgtgccctttagacgtttgtagttggcaactgcttcttggcagtatttcatctcgtcatcgttcatttccttcaagctgatatcgaagcccatcttacacatcatggccacgtcggtacggaacttgatggaggtattcttgttccagctagtcacgtgggcgcacattgcctttgccgggaagaactgggagaatccccattggatatacaaacgctcgatcggatcggtgttgtcgctgcaccagaattccgtgaaatatttcaatgcctcgtaatcacagcgggcacccccaccggagcaaagcatgatcggtaggtgagggtatttctcggctacccgtttgaatacgttatagacacctcgtacatggtcgatatacaattgattctgcttctctttaagatagggggaatagacattggtaatcgggctgttgcaatcccatttgaagaaagccagatccggattctcgatcatgatattatccaccacgctgaatacataatcctgtactttcgggttgcttaagtctaagacaagttgattgcgatagtaataggtctcacgattcggtagatggatcgcccagtccgggtgtttctcgaaaagttcgctcttggggtttaccatctccggctcgatccagataccgaatttcacgccggcatctttagcgacctgcaccagatgaggaatgccgtttggcaacttatcgtgtgtaacctcccaatcgcccaatccggccttatcgttttgacgagggtatttattagcgaaccaaccatcatccagcaaaaacatatctacacctagatgcttggcttctttcattagttcctccaatttcttctcgttgaaattgaaaccggtcgattcccagttgttcagtagggtaaggcgatcgcctttaccatccttgatctggtaattacgtgcccaatcatggatatcacgactggcttttccggttccttgattactcaatgtaaagataaactcaggagtgacgaaccattcgttcggtttcaattcataggcggacgcatagggattgatgccggagatgacacgaaggttaccggcgttgtccacctcgaacgtaaagcggtagtttccagtccaaccgatcgttcccattaaaacatctcctgtattctcgctggccggggcacctaacccaatctcaaaaaacgggtaagcgtgcatggcggcacgggagcctagtttcgtatcgataatctttttcccgaatttcaagtcttggctgctcatctgtacttccttggcccagtcaccgctaaactcggtcaatacatagcgaggactctcgaaataaagcatattggaagcgtattgggtaatcgtgaccggttttttctccatatgacgaatctcagtccaagccttgatcacgttttctttagcgaaggttacataatgtaatttagcctccactgggtatacatcgtctttcagggagataattgtctccgtaacgttattgtctagtttcttagattcgctggaaacatacttgaatatgctagtcatgtttccgtcgttatgctggatggcgaaagccggttcgaaataatcttccgctcctgagcaaggatatacttcccatccacgggttgatacgctgccatccgttccggcttggatattccatgagaggttctcaaattcggattcgtttactaatttattccctagataagtttggtagagccgtccgttgggggctacttgtaaaatcaagtccgtctcattggttgagattaagatcatcttttgatcggcggcttttacgaatggcaaacaaaaacacaaaaggataactgtaagtaatagatttttcatggtaaattatttgaatgtgtaaatagtagagacgtagcgtgccacgcctctactagaatacatattgtaattaattctgctctttcaggatcacgtcgtgagcgccaccctcaacgatactcgtagaggagacaagcgtgatcttggcatgctgctgcaactcttggatagagatggaaccgcagctacacatcgtagcgatcatcttacccaatgttacgtttaaattatctttcaattttccggcatacggtacatagctgtccacgccttcctcgaatttcaaggactcgtttccacccatgtcatagcgctgccagttcttcgcacggttagatccctcaccccaatactccttcacgaagttgtttccgattttcatcttcttcgtaggagactcgtcgaagcgggcgaaataacggcccatcatcaggaagtcggcacccatagccaacgctaataccatatggtaatcgtgtaccaagccaccatcgctacagatagggatataaacgccgtgtctcttgaaatactcgtcacgagctttcgctacgtcgatcaaggcggtagcctgtccgcgaccgatacctttctgctcacgggtgatacagatggaaccaccaccgatacctaccttgatgaaatccgctccggcgtcagccaagtagttgaaaccatcttggtcaaccacgtttccggcaccaaccagtaccttgtctccgtaggtatccttgatccagtgcaaggtctcgtactgccattcggaatagccgtcggaagagtcgatacacaatacgtcaacgccagcctctaccaatgccggaacacgttccttatagtcgcgggtgttgataccggcacctactaataatttcttatctccgccggataactctttcggattctcacggtggctatcgtagtccttgcggaatacgaagtattgaagcttctgatccttgtcgatgattggcaatgtattcaacttatgatcccagataatctggttcgcctctttcaaggtcatgcctagctcgccaacgattagtttagcgaacggggtcatgaaatctttcaccttcatgtcgatcgggtctttgccttcacggtaatcgcgactggttaccatacctagcaatttgccgttaggcgtaccatcatctgtcacaccaatcgtagaatgttctgtccggcggactagctcaagcacgtcggccaaggtattctcgggcgtaaggttagagtcgctgataacgaatccggccttgaatttctttactttgcgaaccatatccgcttggctctcgatcggttgcgagccgaagatgaaggaaagtcctccgttgcgagccaactcgatcgccagtttagggccggaaaccgattgcatgatcgctgaaacgaaaggaatatttaattcaatagcggatttctcgccagacttgaatttcacaagtggcgttttcaatgaaacgtttgcgggaatacattctttggtggttaaaccgggaataagtaaatactcaccaaatgttctcgatacatcgtttaagtagattgccataagattttatatttacaggatgagtttttttaattgtgcaaaagtagcgatttctgttcatatatgaatcacatgtttacatgaaatgttcgaaatatgcgtcccgcaacatttatagttatggatttgttattaatgtagatttaaaaaggaggaaaatatgagagttgtagttgataaggctcaatccagagggtatgcgaatcacggttggttgaaaacacatcacacgtttagctttgctaattattacaatccggaaagggttcatttcgggatgctacgtgtattgaatgatgattccgtggcgccgggtgagggattcgatatgcatccacataagaatatggaggttatctccatcccgttaaagggatatttacgccatggggatagcataaagaatagcgaggtgattacgccgggagatattcaggtgatgagcgccggtaccggtatcgtgcatagcgagttcaacgacagcggtaatgaacaattggagttcttgcaaatatgggtatttccccgtgaggagaataccaagcctcattatgccagttatgacgtgcgtccggttacttcggaaaagaataagttgtccttgatcatcgctccggacggtagcgctcctgcgtcgatcaaccaagacgcttggttctctttaggaaacctagatgccggtcaagtaaaggagtataagctacatagtaaaaataatggggtttatttattcgtgatcgacggagaggtggaggtaagtaatacgatcctgtctaagcgtgacggggccggattctgggaaaccgatggcattacgatagaagtcttgaagcacgctaaagttcttttgatagaagttccgatgatgaaataaatgttgataggttagtgctggcgggtatcttaatagttgatgtaacaaagctattagggtacccgctctttccttgttaatgttttatcggtttatccgtgaagtaatcgatcatctttaagatcgcccggctacaagctggacagaatggagcgtaatcacgcatcatacagtgatccatcgggcgataaatgcctttagcgatgtaaccgcctccctcgaatacgcctgccttatccttatgggcgtcatctaatggggtaggtatcggtgtattagtcggtagaagatctttccatttagcatcgaagttaaccaaggtcgtgatgttcggttcccaaggctcgtacttcaaattataaaaatcttgataagcgacctcggaactgaaatattcatcggctagaccagcgaaactatgtccgaactcgtgaacgaatacgaccggggtacgtgggttatcggcggttcccatggcataaaaattatacataccgccaccaccgtaagcgtccgtgtttaccaagatgaagattgcgtcgcaaggagcgttccatacggcgtcacgtatagacttcatatccggggtggttaaatagcgatctacaccgaatgtataataaccggaattcaacgcggtattcttgaatatacctttaccggatacatctgttcccgattcttccgaaacggcatctaccgcccagacattgaaatcttcccggcgagtgtcataaggcggggttttaaacaatgcctccgtaaaacgtttggcatcagctacgaatttctcttgctcatccgccgtataaccttccgctaagaatacgaggtctactttcccggaggaatccccgttatatcggatttttgtgatccggttttccttgagtttcccccggtcaataaaaatactggccggatcaatctcttgtttcaataaaggatggaactgcatgtcggccttgtctcttgccgtaatctcaatgatgacaggagctttcggataggggatagagatgctatttgtccaagattgtgtctcggtcttcgcttgctccgtacttctccattcttcgaataacgtattgaatcctcgtgagtagatcaactctttaccggctttatcatatacattaatataataccctccataaccaaacggatcgatcaagtttttgaccggccccgcccagacaggttcttcccggagttgttgtatagcggcggcttggaaatcccaatttccactcaatgcgaaatcaatccggagacttttcttcgtgaagtgtttttcaaaattagtttgtgccagacaagtgaaactgtaaagaatggcgaataataataaggttattcttgctctcatagatctataatatttatcatgtgtcaactttatgacgcaaatgtatattatttttttttagatttgccacgattagtgtattatactcgtttataaataaattagacctatgtttagagagatcagacgaaaagaccggattttggataatgagttggcaattcgtttattggaggaggcggaatatggttttttggccatgtcggggataaatgggtatgggtatggaatcccgatcaattatgtaaaggaaggggattctatttatttccattgcgctccggaagggtataagctggaatgtctacgagaaaacccgaaagtgagtttcacggtagttggcgctacacaaatcgttccgggaaaattcacgacaggttacgagagcactatcgcttttggagagatgcatttggatttgccggaagaagagcgtcggtatgccttgcggctactcgtgaataaatattcatcggcgtttaaggagatcggcgaaaagtatattgagaaatctttttaccggactaatatcttacgtctagatatctcgcatatctcgggaaagtgtaaacgattgtctcaatagtataaaaaagggggcctagccccctttcttgcaatatatcaatgatggcttaaataattagagactcctgcgtttgtcgctttcatggcgtcttttcctttggaccaatttgccgggcaaacctcgccatattcttcgaagtgctgtaaggcgtcgaccatacggagagcctcgtctacgttacggcctaatggtaaatcgttgattacataatgacggatcaagccctctttgtcaatcaggaacagaccccggtaagcgaccggatttcctctggagataagttctccactttcgttcgtaatataatcagcggccaatacgccaaagttttcagagatggttttggaaaaatcggatacgagtggataagtcaccccatggatacctcctttattcttatcttggtttaaccatgcgaaatgagaaaattgagaatcgacggagcaaccaaccaccgctacgttacgtctttcgaattcctgtaacttttgttggaaggcatgtaattctgtcgggcaaacgaatgtaaagtccatcggatagaaaaacatgactacatacttcttgcctacatattgttccaaagagaaatcctcgatgatctcattgccattcactactgccggagcgtggaattccggtgcctttttacctattaatgctttcatattataattaatttgtttgttaagtaacaagcgtaagtgaaggtttgttgttgctttttagtaaagagactgattttcttgtgaaatagacctaaagtttatgctttaaaatttctctgattttcaaagattttatttctttgtaacttattgatgttaataaagaaagtatatggaggtttccgaggtaaaacagcgtttgctgacagatttttttacatattatcccatgggaggtgctctgtatgataaaaacggtgcactaattgatataaataagtccttaaacgagaaatttccttttacgaatgaagcggacttcttattaaataatctttttcgtacagatttgttgaccgatcttcaaaaacaatatctgcgtgggggaagcgtggtttccggttctttgcctgtaccgtactccatcatcccctcaatgaatgaggatagagatattcttgggtataccttattattaacgggtaatccggcggtcgggcaggaggcagccggttatgaccgggaattgaaggaattgacggacatgtcgcaaaagatggcggaagcggttcctgatacgatccttttggtaaacaagcaactggttgtagagaggattatcgcttatgctgtggagacttgtataacgccggagtcgatcaatcggcgtatcgatgatcttccgggtttcatttatccggatgagactaagcgtcgtgtggccgcgatcgtgcaaagttgcttgaataagtcggagatcatgaatttagatttatcgattccgggacataacgctccgatcgtttattttaaactacggttggtaccggtacatgaccggtatgtgattatttatatacggaatgtatcggagctcgttgagcaggagaaagcgaatgaggcgttaagcagtaagttgtccgaaagccggatgatgatggagcttgctttgcagaatagcaagattacgacttattcttttaatttcagccggtttaagtcttgcgataaagtacattgtaaccgttgtttccagttttatggcacgaccaatagtttattgaaacgtaatcagttcatttgtcaggctttgccgcaacttcgtcacccggacgattctggcgactttttctatctattcaatacgatccgtacgaataaattggatgaatataaaatagattttcgtctaaagaacgatgataacacctatcggatctatgaggtgatcggtaagacgcatgaaaaggatgaaaatggtttcccgaatttgattgttggctgtatgatcgatgatcaagaacgattggagtttgaggaagacttgatcttagccaaggaaaaagcggaggaggcggatatgcttaagtcgactttcttagcgaatatgacccatgagatccgtacaccgttgaacgctattgtcggtttctctgatttgttaggagtggaggaggattcggaattgcgccaaaattatattagtttaatcaagatgaacaatgatttacttttaagtatagtaaatgatgttttggatatttccagaatcgagtctgatatgatgacgtttacttatatggatgtttatttaccttcctttatgaaagatctatataactccatacaattacgtagaccggaaggggtggaaatgaccttggatgcatgtcccgatatcatatttaatatagatcgaaatcgattatggcaaatctgcatgaatttattgacgaatgcggttaagcatactaaaaaaggtcgtatttggtttggttatacgcttgaggctgaggagaaaatgattaagttttatgtttcggatacaggttgtggcattcccaaggatgaattggataatatctttgcccgattcgtgcaattaagcgattttgagcaaggagtcggattgggattagcaatttgtaaaggtctggtattaaaaatgggcggtaatatttcagtgatttccgaagaaggatttggttctacatttattttcactttacctatgaaaagacccaatagttggaaaaactagtgaacaatactctttgaaattcggttgtctatataagagatgatttaggttgtagtcaatttccataataagcattaacttatacatgcttttggtttatgttttgccataagaaattctggacttatggcctaatctttttgtatcatacctgtaatcaaggattttatatgacgaaaatagaaataaagaatttatctattcttttcggcccggagaaaatgcgtgcgaaaagaatgctagtagcgggaaaaagtaaacaaaacattttgaaagaaacgggttacacggtagctgtacgtaatgcgaacctaaagattgaggaaggggagttatttgtgataatgggactttccggaagtggaaaatctacgctgttacgttgtattaaccgattgaacgagccctctttgggagaagtctttatcaacggaaaaaacataacgacttcctcggataaagaattattggatatacggcgtaaggaaatggctatggttttccagcattttggattgctgccccatcgcacggtattgagtaatatcgcttttggcttggagttacaaggggttcctaaaaaagaaagagaccagaaagctgtggaaagtgtagccctagtagggttaaaaggatacgagaaccagaaggttagcgagttgtctggaggtatgcagcaacgtgtcggattggcccgtgcgatcgcaaatgatcccgaggtgctcttgatggatgaggctttttctgccttagacccattgatccgtgtacagatgcaggatgagctattgaaactacaagagaagatgcaaaaaacgatcatctttattacgcatgatcttgacgaggcgattaagttgggggatcgtatcgccattatgaaagacggggaggtcgtgcaagtaggtacccctgaggagatcttgacagatccggccaatcattatgtctctagatttacggaaaatgtagatcgtggacgtatcgttacagcctcatcgataatgataacccagccggttgtcgctcgtatccgtaaagatggcccggagaccgtgttgaggaaaatgaaagagaaaaacttatatgtattgccggtcgtggatggaaataggcaatttctgggcgaggttcgtttgaaagatgtcttggctcttcggaaagcggggaatcatgatctttcatcgattgtgatgaaagaggttccttcggttctggaaaacacgacggttgaggatatgcttcctttgttaccggagatccggcaggccttaccggtcgttaatgaggccaatcaattggctggcttggtttctacttcatcgattataatcgagatgacggggaaggataaagaggaaatagatcaaattgttcaaaacgcgatagaattatgataaatataggaaaatatatagagattgccattaattggctgactgagcatttcgctcgtttttttgatgtgataaatgatggggtcggaggatttatcgatgcttttcaagatgggctgacttggattccgttttatgtgatgattttgggcttggcattgttggcttggttcaaggcaggaaaaggagtcggcgtgttcacggcattgggtctattgttaatttacggaatgggtttctgggtggaaacgatgcagactttggccttggtactgtcttctaccattatcgccttgatgatcggagttccgttaggaatttggaccgcacgcagtgatcgggcggataagatcatccatccggtcttggatttgatgcaaacgatgccggctttcgtctacttgataccagccgttttgttttttggtttaggtccggtacccggcgctttcgcaacggtgattttcgccatgcccccggttgtgcggttgaccgatctgggaatccgtcaagtcccggccgatattgtggaggctacccgctcatttggcgctacttcctctcagttgctttataaggtgcaattgccattggctttgccaacgatcatgacgggagtgaatcaaacgatcatgctttcactttctatggtagtgatagcggccatgatctcggcaggaggattgggtgagattgtcttgcgaggaattacccaaatgaaaataggtttaggtttcgaaggaggtatagcggtcgttatcttggctattatcttggatcgtattacgcagggctgggcgaaaggtaaagtgaataaacaaaagaaataagaaacatagaaaagaaagaaatagatatatgagacgatttacgattattattggatgctgtatgcttttggtgaccttgcaatttattttcagttgtgtggatagcaaggatcgaaagaaaatatcgatagcgtacgctaattgggcggagggcatcgctatgaccaacttagccaaagtgatattagaggatcaaggatatcgggtaacattaaaaaatgcggatatcgccccgatctttacttctgtcgcttcgggaaaagcggatgtgttcatggatgcatggttaccggtgacccatgcggattatatggaacaatacggggaccggcttgagacactcggaacggtttatgagcatgcgaaattgggcttggtagttccggagtacgttaccattcgttccatcgaggatttgaatgcccataaagatcaatttaaaggtgagattatagggatcgatgccggcgccggtttgatgaactcggcggataaggcggttcaagattattctttggattttgatttgaaatcttccagtggggctacgatggttgctttcttgaagaaatcgattgatgcgaacgaatggatcgtggttaccggatggacccctcattggatgttctcacgttatccgttaaaattcttggaagacccgaaagaggaatttggagactcggagcatatcgaggttatcgctacgaaaggattctctgagaaagatccatatgcagcctcttttttcaagaactttaagttaaccgatgaacaactgagcgaattgatgtattatatggaagacgggacacgtacggaatcgcgatcagcccgtgcttggcttgaaaaacatcccgagataatcaaattattcttaccttcgcaggagaatcaattgaatgggagccatgagacaaattaagggagtcatatgtattttaataagtatcgttatgtgttggtctgcttcagccgcaaacaataaacgttatgtgaatatcgtatttatcgggaatagtatcacgtttggcgccgggttaccgaagcctgtccatgatgcgcctcctgtaaaggctgcgttgtttttaagcaagtgcccggaagtggcttcggtcaagtattccaatagaggacagagcggctgcactaccgttgattatttgccggatacgaatacgctcttcccgtgggtcgtacgtgctgccgataaatttaaggatgagacttgggcggatttggtgttctctattatgctggggacgaacgatagcgcgatagaaggcacgaacggctgcccggtagcgcccgagcggtattatgagaacatgaagacaattatcaatcgcttattagctttatacccgaattgccgtattgtggtacatcgtcctttatggtatagcccgaatacgtataatggagctaaatatttggaagaaggcttgcgaaggctccaagattattatccgcaaatacaacgattagtcgattattatgcgtctcattttcccggacaagtctttctgggagatacgaaaggatttgattattttaaggaaaaccatttaacggatttccaagcggagaagggcaacgccggagtgttctatcttcatccgaatgagaaaggagcggtccggttaggcgaattgtggagtgaggcgattcgtcaggctttagggctttgacctctataaaaaagccatgccatcccaagaagacgacatggctttttaggtccatttataggtatgacaagcaagtattcgtttatctttttcctaatcgatgatccattaatacggcatgatgttctccgtataatttaagtttctcgacaatatttttcgctgtagcctcttcctctacctgctctcggacgaagccccataggaaatcttgtgtcgccttgtctttctcttcggaagcgatatcgacaatcttgtcgattgatccggatacatgcacctcatgctcgtagatatgctggaaaatctccaacggctctccccatgccgtaggaacggaattaactactccgatcgtcacttgtccgccacgcttgattgagtaatcgatcattttataggcatgttcaagttcctcttgcgattgttttagcgtccaatgcgcaaaaccatccagccctatctgagtgaaatgtaccgacatggataaatataggttggatgaccacatctccatgttgatttgctcgtttagagcatctgataattttctgcttaaaatcataatggcttattctattttatgttgtttataaatagaacaagccattatcggttttgttgagtttttacgaaggaaagtgtatcgaggttatttgatctcgattactttctcggccattttagcctcttcctcagttcttttcggtatgctgatactcaagacgccgttctcaaccttcgcctcaatcttgtctttctctacattgtcaggcaaaaccatggtttgttggaacttgctataagagaattcgcgtctcagatagcgtccgtctttcttatcctcattcttttcttcttttttctccatagatacgaccaagttgttgttctcatcgatcttgatgttgaaatcgttcttcgtcataccgggagcggctacctcaactcgataatccttatcggattctatcacgttgatggctggagctgtagagtttgcttttatcatccagtcgttgtcaaataaatcattgaatacatacggtaaccaattttgacttcttctcatcggtgtcataatacagtcctccaattattagttaaacattctatttactattcttatttctgaactcgtcctttttaatctcgaattcgctatagatacttcaaatggcatgccaatctgataatgtgtgtgttaatgcggataaaagagattgaataaggtttaactcacgcatggggaacttatgattcgggggatgcgggtgcagggaataatatcttttagaaactggaataagatacaatgaaacgggaatctgtaatattggcataatatacgttattttggcacgatagaatgacggactggataataacttttatctttagacgttctattcatgaatcatatgggatcatgttatctaaaacagtaaaattgtatgtctagaagtaaggaattgattttattggcccaacgtatccgggccttgtctcagacgggggtggtttattcattaagcgagtacgatacggaacgttatgaagagttgagccgcctaagtgatgaaataacggctctggctaccggattgaagcccgatgatgtggcgagtggttaccgtccggcccaagaatacgtaaccccgaaagtcgatatccgtgcggttgtctttaacgagaaagacgagattttgctggtccgtgagaaaatggacggatgttggtcgttgcccggcggatggagcgatgtggggtattccccgaaagaggtagcggcgaaagaggtgaaagaggagacgggcttggatgtgcttccggtccgcttgctggccgtgatggatatgagcaagcatccgcatcccgctataccttattatgtatataagttttttatcctttgcgagttgaagggcgggtcgtttaccgagaccttcgatatcttggggaaaggcttctttcgattggaggagttgcccccgttgtccttggagcgtgtgctgccggagcagatccaacggatgtacgcctattataagcatccgggcgaagatgtttatctggattaaggatacttttgtaccttcgcgacttcattttaaaaacaatgttatgaaaagatattgtcagaccttggatctgaaagaggacgagcagttgataaaagagtattgctattggcattcgccggaacatatctggccggagataccggaaggaatccgtgcggtagggatcttgaatatggagatttaccgtttgggaacccggttgttcatgatcgtggagacgccggatgattttgattgggatgcggcgttcgcccgtttggcgacgatggataagcaagcggaatgggaggacttcgtggcgaagtatcagaaagccgctccgggaagctcctcgtcggagaaatggcagttaatggaatgtatgtttaaattgccgggtgcgagtaaatagacggaaggatggaaaaacaaaagaaacagtcgctggtggccgccccgggagggaaatcttatttggtcccatttatcttgatcacgagtttgttcttgctttggggattcgcccacggactcttggatgtgctgaacaagcatttccaaggagtcttcacgatgaccaaggcagagagcggcttggtgcaattctctacgtatatcgcttatttcttgatggcgttgccggcgggagcgttcatgaaacgttacggatataggaaagggattatcatgggtttgctattgttcgctatcggagctttcgggtttatcccggcggcttttttgcattcggctacgcctttcctgatcgccttgtttgtgatcgcttgcgggctttgtatcttggagacggcggcgaatccttattctacgatattggggccgtccgcttccgctgcgcaacggctgaacttatcccagtcttttaatggattaggttggatattggggccattggtaggtggtttgttgatattcggggcatcggagggagattcgatggcgttgactaaaccttatatcttggtaggtggtatcgtcttgttcgtagcgttgcttttctttttcacgaagttgccggagattaagccggaagaagaggaggaggtgaccgctattgtcgaggagaaacccgctgcctccctatggaaacgtaggcagtttgtacgttccgtggtcgcccaattctgttattgcgccgcgcagacgggaatcttcgggttctttattaattacgtgacggagatggacccgggtatcagtaatttgcgagcgtctcgtattttggcattcggtggaatggccttgtttatgatcgggcgtttgagcggtagttttacgatgaagtggttggctccgggccgcttgctgacttggtattctttgttgagtgccgtttgtatggctttggtggtggcttccgtaggtacgctttcgctatacgctctttatttatcctttttcttcatgtccatcatgttccctacgattttcgccttggggctggaaggtatgggcgtttataccaagaaagcctcttcttatatcgtgatgggagtcgccggcggcgctttcagtccgatgctgatgggatatatcggcgaggagaatatggcgctgggtttcatcgtcccgttgatcgctttcttgtatatcttgtatttcgctatcaaatgtaatcgataaatttggaatgctgttttttacttatggaatccggataataaaccagtatggcttgtgtatgaaggcttgggtttcatgggataaatgttacgctcaagtaatatctgcttatctatatcgttttcattttaaataaaataaaagagagtggatatgaataaaggtttgtttttgtgtgggctatttatagctctatttctggctggttgtggggatgatgaggttaaaatcgctaatcagatgactttatattcaaggccggatacgattcatctgggggtgacttagggatggattccatattggtgaagggcttcacggcttgtgaggcgtatgacgcgaaatggggaacattgcccggggatgttgcgcgagagtttgatatgaatgcctcttatctctatttctcgtatgaggcaagggtggttttattggaagatagcatttatgacataggtataggacacttttgggatgagaaagctggattctcggaggatttgagttcgtatggcttcgttatcagtacgtttggcgtgcaaaaggataagaagcaagtgctggcgtgtacctatttaatatatgtagagaagaactcagatggagagaagatcgatcgctggcttcctgtacgaccggaggagttgcggtggcgttatctccgaatagaagactttgatcaattaaaaaatgtagaatgatatgagacatttaatagttgtatgtctagcttttatgatgggccttaatgtggcttgctcacgggtggaagatctcggtaaggatgatttgcattctgaaccgacaatagagatcgtaagtggtgataccttggatattgtagggttcactcttgcgcatgagctggctactagtgaagggcgtttgccttataacgtaggggatgagtttggttatacgggttcttacacctataagtcctatgtggtaaggacggaatatacgtatcaggatgatggaaatagtatttgggtttgggaggatacattgagttcaataataggtttttatccttatcttagatctgaggtatatgatcttgcggatgttcagttccatatccggtcgtgcgctcaagggggatcggtctctgtcggggaaaggacagatatgtatgatacggctctcctccatatcattcgttccgcgaatggagaggatatggatgtatggattccttgtaaaccatcggaattgaggtatcggtgtgttgtctatcatttggaagagtgaacgttttagccaagctccggcagtagataatacccggagcttgacaatacattatcactgcaacatctgcatcaacttatccaacttaggagccatgatgatctccgtacggcggttcttgctacgtccatcggcggtctcgttatcagcgaccggcataaactccccacgaccacaaggttgtatctgtagcggattcaccccgtaatccttggtaaggatacgtactacggaggtcgcacggatcacgcttagatcccaattatccttgaattgggcggtattgatcggcttgctgtccgtatggccctctatataaacgtctatatcgttttgcttattcaacacctcggccaacttagccaacgcttccttgcctcgtttatcgacctttgcgctacccgattggaacagaagcttatccgacatggctacatatactttaccattcttctcggttacggtcagctcatcactgttgaaacccagcaaagcgtctttcacgctactcaacaaattctgtacctttgcgttctgtgcgttcatcatatcctgtagctcgttgatggtacgctcacgctcgtccagctcactcatcttttgctgtaacaaggcattcagcttgtcctgctcacccatattggtattcaacatggtctggtaattacggatatcacgccccattgtggtcgtatcccttatcaaggcggcgatccggttgttgagcgcgtcgttatcgtccttgcatttaatcaattcctccttcaaggcgtcgccacgtccgatcgcctccaaccggccgttctcggcaaggaggtatttctttttactcacgcacgaagaacataaaaggagtgcggagaccgagataaataacaatcttttcattttacgcataaaatttcgtgcaatgtaatatttattacaatttcctacacgcaagtttaggatatttgtatctcataaaccaatattaaagaatcagcggtatgaaaataagagaaataatacaaacgctgttcccgacaagaacttggaaactagccgctatcatagccggaggtgtcctttgcgggctggggtcttataccttatatgcttcccgggcgtggacttatttgtccgacgacccggctacttgcgtgaattgccacattatgggcccttattatgctacatggaatcatagctcgcacagccgtaacgccacttgcaacgactgccatgtgccgcacgagaacgccgtgaagaagtggttcttcaaaggtatggacggaatgcgccacgcctcggtattcatgatgcgaggggaaccgcaagtgatacaggcgatcgacgagagcgcggaggtaatcatgaataactgtatccgttgccatacgcaattgaatacggaattcgtgaataccggaaggatcgatcatgagatggcaatggcgggagaagggaaagcttgctgggattgccatcgcgaggtgccgcacggaggtacgaacagcctgtcttctacaccgaatgcgttggtgccttatccgaagtccgtatcgccggactggttaaaagatatgctaagtaaataataataaatcagtatagttatggaaaagaaattaaaatcatggcaaggttggttgctgtttggaggaaccatggtcgttgtttttgttttgggtatgatcgctgcttccgtgaacgagagacatgcggaggtcactagcgtaatgaataataagaagacggagatcacaggaatcgaggctcgcaatgataagttcgaatcgaattatccacgtgagtaccagacttgggaggctacggcggatacgagtttcaagagtttatacaatggaaatcaggcggtcgatgttctggaggctcgtccggaaatggtgatcctttgggctggttacgctttctctaaggattattctaccccgagagggcatatgcatgcgatcgaggatatgcgtaacacgttgcgtgtaggcgctccgatgacagagaacgaggggccgcaaccggctacttgctggacttgcaaaagcccggatgttccccgcatgatgcaagcgatgggcgtggataatttctataagggtaaatgggcttctctgggtaaagagattatgaatccgatcggttgcgccgattgccatgagccggagaatatgaacctgcatatcagtcgcccggctttgatcgaggctttccagcgtcaaggcaaggacatcacgaaagcgacccagcaagagatgcgttccttggtttgcgcgcaatgccacgtggaatattatttcaagggcgatggcaaatacttgactttcccttgggataaaggttctacggttgaggatatggaggcttattatgatgaggccggtttctccgattatacgcataagctaagccgtgctcctattttaaaggcacagcatccggattatgagatctcccaaatgggtatccatgcgcagcggggtgtatcttgcgccgattgccatatgccgtataagagcgaggggggcgtgaaatatagtgaccaccatatccaaagcccgttggctatgatcgaccgtacgtgtcaggtttgccaccgtgagagcgaggagaccttacgcaataatgtgtacgagcgtcagaataaggcgaacgagatgcgttaccgtttggagaccgagttggcgaaagcgcatatcgaggcgaagttcgcgtgggataagggggctaccgaggatcagatgaaagatgtattgaaactgatccgtcaggcacaatggcgttgggatttcggcgtggcttctcatggtggtgcgttccacgctccgcaagagattcaaaggatattaggcaatggattggataaggcgatgcaggctcgtctggctactgcgaaagtgttagcgaaattaggttatacggatgatgttccgatgccggacttctctacgaaagaaaaggctcagcaatatatcggtttggatatggccgctgaacgtaccgccaaggaaaaattcctgaatacgatcgttcctcaatgggtgaaagaggcgcaagaaaataatcgtttagcgaagaacatttgattatgtggaaacaaccttggggatctgctgaaggctgggccatctgtgccggtttactgattacgggatttggcttgcaactgatcactggcccggttcaggcagggttgttccaatatccggtgaatgtggccggaggattgatttttctgctggttctatgtatagggtttgttgttagccggaaaatcacggttgtccagtggttttccgggttaacggcgagcattacctctttgtcggctcttttgtcagttgtgttggttatgggatttgtgggtccgggtatcgagcggattacgatgtcgtggccttttgtcctgctgtttctctatttcttgtttgtcttgggctttgtcacattgaagcgtatcgtatcgtttcgctggcgggatgttccgtttatgctgaaccatgccggcttatttatcacgctgctggcggcgatcttgggaaacggggatttacgccgtttacggatgacggttccgttggagaatcccgagtggagggcttcggacgagaagaatgagatgatagagctaccgctcgccatcgagcttcgttcgtttacgatcgatgaatatcctcctaagttaatgctgatcgacaatacgaccggaaaagcgcttcccgaaaagcaacccgagaatctattggtagaggaaactcccttggccgggaacctgcaaggctggaaggttgaggttacccgttcactaccgatggcagcttgcgtgatggggcaggatacggtaaacttcgtggaatttcactccgagggggcgaccaccgctttatacgtaaaagcacgtaacgaacttaccggacggcagaaggaaggctgggtgagttgtggcagctatatcttcccatatatatcgctccagctggatgatgcggttagcatggtgatgccggaacgggaaccgagacgctttgcctcggacgttatggtctatacgaaagataaacagaccaaggaggcgtgtatcgaggtgaataagccgctctctatcgccggatggaaaatctaccagttgagttacgacgagacgaaaggtaaatggagccggatgagtgtatttgagttggtaagagatccatggttgccgatcgtttatacagggatcttaatgatgatagccggggcgatcggattattcctgtccgctcccgtaaaaaaagaatagtatggattggagttactttatttatttcgccgctccggcgttactttgctggataggtggggcatggttggcttatcgtccttctttttccaagggggctgtcgcttggaccgtgtttggcttggttatattttccgcttttatcgtagggatgtggatctcgttggagaggccgcccttgcgcacgatgggcgagactcgtttatggtattctttcttcttgccggtggcgggcgtgatcacttatgtccgttggcggtataaatggatactttcctttagtacattgttggcctttgtctttatctgtgtcaatctgtttaagccggagatacataacaagaccttgatgcccgctttgcaaagcccgtggttcgctccgcacgtgatagtctatatgttctcttacgccatgctgggcgccgctgcccttatcgccatttacctgctgatccgtgcgaggaagaaggggattgacgaggggatgatgagtttatgcgataacttggtatatgtcggtatggccttcctcacgattgggatgctgttcggcgctttatgggccaaggaggcgtgggggcattattggaattgggacccgaaggagacatgggcggctgccacttggttggggtacttgatttatatccattatcgccttcgtcatcacttgcgttattcggcggcgttggggcttttggttttctcttttcttttgctacaggtgtgttggattggcgtgaattatctaccctccgcacgaggatatagtgtacatacttataatatggaataattaaaatcagaggtatatgaaaaaactagttgttttagtagcgggcttgctctctgtggcccttttcgcgcaagcggaagaaacacaaaatacgaaagagaatacgttttcgatgaaagtgcagatacgtccgagagccgagtaccggaacggggtcttattcccccggcctaaagatgccgagtccaccgggtttatcaataaccgtgcccgcttttctttggggtatgagcgggatcgtttgtctatcggtttgtccgcgcaacatgttggcgtatgggggcaggatcctcaaatcgataagaatggtcgttttatcttgaatgaggcgtgggcgaaactggatttcggatcgggtttcttcgctaagttaggtcgccagtcgttggtatacgatgacgagcgtatcatgggtgcgttggattggaacgtggccggtcgttatcacgacgctttgaaactgggctatgagaacacgaataaccaactgcatttaattcttgcgttcaaccagaatgatgagaaaacgatcggaggaacgtattacgctccgggcgcgcaaccctataaaacaatgcaaaccctttggtataagcatctcttcgacaagagttttaacgcatccttcttgtttatgaacttagggatggaaggcggtgatgccgagaaacaaaactcggatacaaaatacctgcaaacgttgggaacgaacctgatctatacgcctagccactggatggtaggcggtatgttctattatcaattcggcaagacgaaaagcggacgggatgtttccgcttttttatgggcggtaaacgccgcttatcaaatcgatccgcaatggaagatcggtgtaggtagtgattatctgagtggctcggatggggccgacgggaaatataaggcgtttgatcctctgtacggaacccatcataagttttatggtgccatggattatttctacgcctcctcttttgtcaacggattgaatccgggcttatgggataatcaggtaaatgtcgcctataaaccttcttccaaggtaaacctgtctttagcctatcattatttctccatcacgggcgacgtatacgaaggtaatgataaattgagtaaaggtttaggttcggaattggatttccaagtggattgggtaatcatgaaagacgtgaaattatccgcgggatattctacgatgttgggtacgaataccatgaaggccgtgaagggtggaaatccgtctcattggcaagattggggttggttatcaataaatattaatccgactatattcacgacgaaatggtaacagttctcaaggaaaagggtatatttgcaggagtaaaccttttttcaaaacaagatacgatggatataaccgatatgtttaaaattccgctttttaagaattttacgcttaagatgcgggaagagtttttggataaacttgaatatacagtagaggagcatccaaaaggaaaaaccataattcatcaagggacgacttgtaacgcccttcatgtcttattgaagggaaaattgaacgtggatgttttggacgtatcaggtaacatcgtgcgcgtggagacgatacaggctccacgcacgttcgctacgcctcatatcttttccgagaaaaaccaattccccgctacttttaccgtcgacgaggatgtggtattgcttaagggttccaaggagtctgtatttaccttaatgcattctatgccgttattcctgcataatttcctttgtgtcagtacaagctgtaataaatgtacgatgactcgtttgaaggtgctttcgtttcgtggcatccggaaccgctttatttattacttattcgaacatcagcaaaaggattcgaatgtcgtggaactagaacatacccaagagcagttagcggagtattttggtgttacccgcccggctttatcgaaggaaatcgggagattggtggatgagggatttatcagcattacaaggagaaaggtgacgattttaaataagacggcgttaacatgtatgctttaatgcttttgggaaaaaggtaaaaagcgtacatttgtgcccaaataaataactccggtgtatgggcaaagttttaattatcgacgacgagaagcagattttaggtttactttcacgcattatcggtttggagggatacgaggtcttacaggctgctacttgtaaggcggggctgaggcagatggagcaacattcgccagaggtggtattgtgcgatgtgttcttgccggatggtaatggtgtggatttggtgtcggacttaaagaaacttcgccctctatccgagatcatcctacttaccgcgcatggtaatattccggatggcgtacaggcaatcaagaatggagccttcgattatatcacgaaaggggatgataataataagatcattcctctggtagccaaagcgatggagaaagcttctgccgcttatcaacagcaaaagaaggaagctacgtccgtcgggaggcaatattcgtttgatacgattgtcggtaaatcacccgctatccaagcggcgatagcgttggctcagaaagtctcggctacggaggttccggttctgttgactggtgagaccggtacgggaaaagaggtctttgctcaatccatccatcaacatagttcccggaaagggaagtcttttgtcgctatcaattgttcctcttttagtcgggatttattggaaagcgagatgttcggtcataaagcgggggcttttaccggtgctttgaaagagacaaaaggcttgtttgaggaagcttccggaggtacgatcttcttggatgagatcggggaaatggctttcgacttgcaagcgaaattgctccgtatccttgagaccggggagtttatcaagatcggcgatacgaaaccaacgaaagtggatgtacgaattattgccgctaccaaccgtgatttagagaaagagatcgagcaagggcatttccgggaagatctattttatcggctttccgttttccagatccatcttcccgcgcttcgtgaacgggtcgaggatatccctctccatataaaagcctttgtttccgctttttcctccaagatgggaaagaatatccgaacaatttcgcccgaatatatagatgccctgaaaaaacgagcttggaaaggtaacgtacgtgagttgcgtaatgcaattgagcgtagtctgattattgccgatggagataccttaaccttggatgccctccctttgaatatgcaaacctcctctgcggcgagtacggaatcttatagcggttttgacctgagtggcgtagagaaaatgcatatccaaaaagtgctcaaatacacaaaaggcaataaaaccgaaacttcccgccttctaggtataggcctcactactctttatcggaagattgaggagtatgggctttagtctcatattctgcatttatgtatacccgaaagcatcttgaagatatgcaaggagaaacggacattgctaaatattttatctttgctgaacgtaaacttaataataatcgcttaaaatacatcacctatgagtctgaagattaaaacaaaactaagatacggaatcgggctgctgtttgccatgatcgttttgctgggaggtctatcggtaaagaacatctccgatatgtctgccgacacaaggaacatattggccgataattataattctttgctctattcacgccggatgctggatgcgctggaacgaatcgatagcgatccttcggctcaagcagatttcgagaaaaacctagggctacagaaaaagaatatcacggaggtcgatgagaatgtggccacctcacatctagtcgctcaatacgagcaattggcgaaagagcgtaatgaggagaatatccgtcgtgtacgtctcgccttaaatcaagtcatgagtttgaatatggcttctatctacaggaaaagccaagtggcggagtctacgtctcaaaaggctttattttggatttgggggattggcctctcttgtatggtggtcgctttcgcttttttaatacgtttcccccgttcgataaatacccctatccgtatgttgatggacggtatcatggagatcgctaaccataattacgagaaacgcttggatctcgctaaatatgatgaattcgagggggtcgcgaaatcctttaaccggatggcggaacggcttacggaataccggaaaagtacgttggcggatattatccaaggaaagaaatatatagaggctatcgtgaatagtatcacggagccaatcataggcttggatcgggatcgtaagattcttttcgccaataacgaggctttgacgatcttgaatctcaagcgggaaaacgtgatcggaaagtctgcctcggaattatccttacggaacgatttgcttcgcaggttagttcgggaactgattcagccgagcgagaaaaaagagccgcttaaaatttacgcagataataaggaaagttattttcaagtgcaatatataccgatccgtgtgttggagaatggcgaggcggaggtgtatgtgggcgacgtgatcttattgaagaacatcacggagtttaaggagttggattccgctaagaccacttttatctcgacgatctcccatgaattgaaaactccgatatcggcgatcatgatgagcctgaaattgttggaggatgcccgtgtgggagccatgaacgacgagcaaaaagcactggcggaaagtatcaaggaaagtagtaatcgattactggaaataaccagtgagctattgaaaatgacgcaggtggaggctggcaagctacaattgaatccgaaaataaccaaaccgatcgaattgatcgagtatgcgataaaggcgaaccaagtgcaagctgatcgcttcaattgccatatagaggtggaatacccggagaagatttccaagcttttcgtggatagcgagaaaatcgcatgggtcttgacgaatctattgtcgaacgcaattcattataccccggagaatggccgtatcataatcggtgcccgccagcaagatcatagcgtggagatctatgtgcaagatttcggtaagggtattgatccccgatatcatcaaagtatattcgatcgctatttccgtgtgccgggaacgaaggtacaagggagtggcctagggttggctatcagtaaagacttcgtggaagctcatggaggaacactttctgttgatagcgcagttggaaaaggaagtacttttgttataaaattcaatgtataagagggtaaaaaaagagggtgttaattaccctcttttataatatcgcttcctccggaagtggatgtatccgatcttgccgaacctttgtaatgtacatcactacctccgcttgccgaagccttgatataatcggttacgtgcgtataaatatcggagccaccactggcggaacattccaactggtttaagataagatcataagccttgatatccgagccacctgaggcggaatattcgccgttctccgcttttcccgtaagcttgagatcgctacctccgctggcacggcctcgtattattcgggtagtaagatcgttgatgatgatatcgctaccgctggtcgcctcaattatgcaattagatacgttgaccggtttctccattttcacgtcgctaccccttgtcgctataatttccagatcatctccggataaagcgcttctcaggacaaaatccatacaaccggacatctggattttttccagcttcttggaagtgccctctattttaaatcgggtagggcttaattgtgtaccattctctgtggagattgaaagttcttcgttttttacttgaacgtttatataaggatataagttctcgtcgatcgtgattcgtaaggacgctgattctccttgcgtatatccgaaaacgtacgacggatttcccccacggctgaataggctgaaccaactgtcgctataccccatggcggttgagccgacttttatcgctgaatagtctctgacggagatttctttcgtgataatatccccattcccttttactttcttcgcctcgataggcatcacgcaaaaagcgatcaacgcaaataaggccatcattcttgttctcatatgaagtgtaattaatttatactcttttcttataagacgaatggagttgaaaaaacgttacatctaaaatgaaaaaaaaaagctatcattgactttttttgtgatagcttctttttcttgccctaataacagggaggtcgattaattacttttaggtttttcaaccatatgttctactctgtctttgacgtattcgacttgatttttacccgtgtctaccacgtcctttacttttttcttcgccttatctgtaagaccgtggagttcgttctccagacattcgaactgtccttgatcttccatcctgcgaagtacgtaaccaacaactacacctacggctaaaccgaataatacatttttcataactactactttttatgagttaaaacattattttttgtagttatgaaacagcaagtcaaccaataaggttggtgtttatttgttatttttcagtaaatccctaatctcggtaagtaattggatatccgcagggggagcggccggagctttcggggcctcttccttcttcttgcttaaagcattaacacctttgacaagtaaaaagacggcgaaagctatgattatgaaatccagtgtcacttgtatgaaatttccgtagttaatggagaccgccggagagatcaccttgtctccctccattacagcatgcttcaaggtgatttttaaatccgtgaaattgacgccacctacaagtaaacctaccgccggcatgatcagatccgctacgatagaagatacgatctttccaaaggcaccaccgataatgatacctaccgccatgtccactacgttacctcgcatggcgaactgcttaaactcttgtaatatttttttcataaaacaacgctttttatattataacaacaaaattagccataagttgaatattttcaatgcttatagcgaaatttgaagaaattatttttgattttcatgtttttgtttgacccatttgagcattgatgtgttatatcctctttctttggccttagtcaataaaaagagaatagcctcttctgggagtgtaggcgtacgactaagtagccataaatagtctgaggtattactgcctacgagagcgtatgagtaattatcctcgtcaatttccataatgttgtactcggcgtagaaccgcataaagaaacacacttttaatttactaggacacgtaggatctgttattttggctatacctttcgctcgtttgaaggaaccggaaaaattaccccaatatccgctgttaacaacttctatatctccattcgggagaaatgagtattccacggtagcccctacgagattatgctcaaagcgatgatcaaagcgtgctatttcaaaccatttccccatatagcggtgtaaatccaaagtctggacggtttctttgtttataatgtgttgagtgcaagataaattacactgcattataagacagatgaggcctattagtttaaatcgcataggtttttatttttatctcataataaacatagagagcctctaaaaagtttgaaaacgttcatattttaggatttttattttttcgacaatctgtgctttaacttttaatttgaaatttctatcctgtctgaagtgagaaattcgtagttgtggcatttccggacgatagatttagatccacgtttttatatgtttttttgtattgaaaatttcatagttatgatttggaaaagtcataactatgaaataaaaagtcataactatgaaataaaaagtcataactatgaaataaatgactctttacagtgaaaaaaatatatgaagatgttttaattgtaaatgcttgtttgagagttagtaatcgtcaagatgtctaactttgcgtgtttgttttcagttggaatttaaaatagagagatatggatgagaaagatttggtggaagggatgcgagagtatataagtctgttacaaaaggaaggacggtattcctcggcgaaaagttatcaggatgcgatgaactcttttatacggtatagcgggacggatcgtatcccatatacatatataaataaggatactcttcgccggtacgaggcttatttgttggagaaaggctgcatgcgtaatacggtctccacgtatatccgccgtttgcgttgtatctataacaaggcggtggagaatggcgaggcggcgtttatcccttcattattcaagggggtttttacgggtgtggaaagccagcgcaagaaatccttgcctctgggtgatttgaatcgcctgatgactgtccctgtaaaaggagagaagttaaggaagacacagttggccctttgtttgatgtttcaatatgggggaatgtcgttcgttgatttcgcccatttgaatagaggtaatatcaagaacggcatattggattacaatcgccagaagaccgggacctctatgcggttggaggtcttggatacggcggaagctatgtataaggaactggcaggtgagagggcgggaggctccggctatttatttccctttttaagtgggacgaagaacggccatgaggaatatctcgagtacaatgcggccttgtcccggtttaaccggaacttgaagacgttgaaagaggttgccggaatagtctcggatgtgacttcttacacgatccgtcattcttttgccatggcattgaaggaacaaaatgtccccatagagatgatcagcgagttattaggccataaatccatcaagacaacccagatttatctgagaagtttctcgttggagaaaatgacggtggtaaacaagtcttgctttgagaatgtatataattatatgccagaggtgggatgaggctacttggggagtagcgttcatttcacggtgcaaatgtagcaaaaaatagcaaataacaagcaatcattagttttagtttgtgctccggccttgattctccttaaatcttcgttcttattcctagtgtatagacatggcaatagagacgaaatgatctcgtatttcctacatcatcacgtcccttctaaaaatcgaacatacattcctgtagagacggggcgtgccccgtctcatcccctccaaatggtaacttaaagctactatcagacagtgggagacgggacacgccccgtctctacaaccgggtgataaccgttctcgcaccttttacgctactccccaagtagcctaagatttcaagagatggtaattttcagtaatgccatatttaaaaatataaaacgctgtttatcaagatgatgtaaatgattcttggtagggctctgaattgccgtggggtctgttttcgggccacgggataaccactagaaaagataatcatagagatggatatattgacaggcaagtgctcggataggttcatggcgcatgttctgaagcgacgtgaccaggaggccgtccgctggtacgtgctcacgctccctaccgccggtggcgggcgtgacaggatcagcccctcgaaggggctggacgctgagctttcccgccgtgagcgtcgtggggaggccttgttcgagtatttctccccctcgtatgtcgaggcgaggaaggtgggcggcaagatggtcaacacgaaacggcccctgctgtacaactacgtgttcgtccacgcctcggaggacgagatcttccgcctgaagcgtacgcttcccctgtataatttcctcccccgggtttcctccggcgggcggtcttatttcccgtacctctcggatcgtgagatggataccttgcgttgggtcgcggcttcttactccaacgagcttccggtgtacgtgccagatagcggccgcttgttgaaaggcgaccgtgtgcgtatcacctccggcccttttaccgacatggaggcggaggtggtggtgcagccgggcggtgggcataaggacgtgatggtgcgtatcctcgactgtctgtgggtccccttgttcgaggtgagagcgggggagtatgagttgatcgagctgaacacggggggcaagcacgtgtatacccatttggacaacgaccgtctgtcggagggcttgcacgatgccttgggccgttaccatgcctccggcgtggtagtggatgaggatgtccgtctggcccgtgaggtcctgcgtggctacgcctctctccgtggtgagaccgacgtgatccgttgcaagctttactctttgctccttccagcctatctgcttttgggcgagtcggatgagttcgatcgtttgcacgccacgatgcgcagcatgctcccggtgataaaagcggggcaatcccgtgccttgttgctggtcacgctgtacggctgtacggacagcagcctctaccagcgcatggcgcacgaggtggttgacccgtggctggacgagccttctcccaagaaaagtaagtctgtgttgatacgtcgtctacgtgattacgacggttggctgaaacataatgaataaggaataattcaaaattcatacatcatacatcataattcaagacatgtcttcccttccttcgggcatccgtttgatgaacctgttgcgtgaccatttgacagagatcatggatcgtgagcgtgcgaacctgaactcaatacacctgtattgtacgggatcttactgggtgtcgttcgagcgttctgcctatcagttgcgtcgtgtgtttccggatagcgagactacgccgctgcgcctgttcgcttatccgttcccgatcgtgatggtgtccgttacggatcgctcactccgtttgtacgcccgtaaacatatcttgaggagggacgagacggattacaagctattgaccgtccccgggcttcccatggcggattaccatgtatggcacgctggcgaggtggaaggcttgccccagctgacatgaactccaaatatgaagcgctggaaaagtaataaactcaattatggtataatgattttgattgatggttggcaattagcatgaaatttcgtatatttactctagaggaaaaataattgtcataaattaatgaaagcggacgtgctaaattcgataaaagagaccttacgtaaggtgatcttgatttccatctgaaaggcactcataaggaaatgccgtccgatgagatgggcaatggggcgatagacccccatgagcaatcttaggtgacttgcgccactaacctaagatattttaccaacgcacctaagatacatggtggatgaacctaggatatttttttagtcaaaacaaatgctttgggtctgttacggatctgaagtgactacttatatacaataatcattatgtcagaggaaatcaaaattgctgtagctggaaccggttatgtcgggttgagtattgctacgctgttggcacagcatcatccggtcactgcggttgacgttataccggagaaggtggagacgctaaaccggaagcaatctcctattcaggatgagtatatcgaaaaatacctaaaggagaaggagttgaacttgacggctacgcttgatggagcgtccgcttatcgtgatgccgatttcatcgttattgcggctcctaccaattatgatccggtgaagaactattttgatacgcaccatattgaggatgtgatcgatctggtattgagtgttaatccaagggcggtgatggtgatcaagtcgaccattccggtcggatattgccggagtctttatctgagatacgcccaaaagggtattgagcgactcaatctgctgttttctccggagtttttgcgtgagagcaaggcgctttatgacaatctttatcccagccgtataatcgttggttatcccaaattgctaagcgatgagcaattcaatgcggagaatgaggcgatcgagaggattgcggatattccgggtttggagaaggctgcccacacgttcgccgccctgcttcaagaaggtgccattaaacaggatattccggcgctattcatgggaatgaaggaggccgaggccgtgaagttgtttgctaatacctatctggctttgcgtgtaagttattttaacgagttggatacctatgcggaggtgaaaggtttggattcgagtgccatcatccagggcgtggggctggatcctcgtattggcacgcattataacaaccctagctttggttacgggggctactgtctgccgaaggacaccaagcagttgctcgccaattatcaggatgttccccagaatatgatgaccgcgatcgtggagagcaatcatacccgtaaggatttcattgcggaccaggtgttgcgcaaggccggctactacgattatagcgagaggaacattttccggtgctccgaagagcgagaatgcgtcgtgggggtataccgtttgacgatgaaatcgaacagtgataattttcgccagtcctctattcaaggcgtgatgaaacgtatcaaggcgaaaggggtcaaggtgatcgtctatgagcctgcattgaaagacgggagttctttcttcggcagtgccgtggtgaatgatctcgcccgtttcaaggagatgagccacgccatcatagccaatcgttatgatgattgtctggacgatgtgttgggaaaggtctatacgagggatatcttcggtagggattgaatctttagatgatggctttacaagagaggctgggaaggaataagaccatactggctaatttttcctatctgagtttgctgcaggtattcgctattctatttccattgcttacctatccttacttgcttcgggttataggcttggaattgtatggcgtgatcatattcgctcaatctataataaactatgtatcgctggtgatcaacttcgggttcaatatgtccggagcgaggaacgtggcgacttacaagcaggatagggcaagattatcccggatcgtcacatccatttattggtgtaagttcattttatggcttgtttgcctagtcctgtatttatcggtcatcagtatggttccgttctttgaggatcattattgggtgtatattctttcttttctgttgacattcaacgagcttatgttgcccatctggttctttcaagggattgagaaaatgaaatatatcacattcgtaaacctgtctgcccgcctgttgtttgtggttgccatattcttgtttgtccatcggcaagaggattatttgctggttcccttgttaaatgggatcggagctatactggctggttgtctctctttatatatcttgttgggaaaagagagagtaaggttttctttgataccggtaagggaattgcgatcgacctataaagagagcttgcccttatttgtttcgatcctgtccacacagatttatgtgaacgttaataaattggtgatcggttcttttctggggatgttggaggtttccatttatgatatggcggataaggtgcttcttttgatgaaactcccagcctccatgatagcgcaagccgttttcccgaagatctcccgtgaacagaatattcgttttatcaatcatgtgatgttcttatcggtagggatcgctttacttttctacattagtatgttcttcggtagtgactggttggtgtatcttctcgccggagaacacatagaagaggcttctgtcattatgcgattgctgggaatctccgcaatcttgacatctatcaatggtttctttggaggaaatcgtttggtcccgctaggttattcgtttgtgtatatgagagtgatggttggtaattgtctgtttttcctaacggctataggcttgttgtggctgacagaaagtataaccatgtatacggttacagtgatggttgtaggggtggaagtgttttgctttgtgtcgttggtttataggaactggcagttagggttgttgggggtgaaaagataaggttgatttgagagatacttgatgtgggaaagatggagtggaatgaaatatgattaaatatacggtttgttgaaatgtgtgataagaaagataattctatagaataatcttgttgttgtagcattgttttatgctgttgcttgaaaaccgtagaaatacataaatatactctaataattggtctatgcagatgtgtgtagttgtgattttgttatttgttttaatgccttttatgtctttttattttgtaattgctgaagtgtataataagaggaaatattcatattatttattgtttgttttgatgggcttgttttctatgtattatttcccctatcaagatcaatatagatatatggaggggtatttgttccttcaagataaaaactttagtgatgtttttatttatgataatattgtattgtattttctgaatttatttgatatatttatgtttgtattttctaagacaggtattagctatgagatatttagatttataatcgttgttttatcatatatgctggtttttgttacagttaaaaagacgttgaaaaaaatgaattgtaatagtgatatttgttttttgtcttttttagttattttcttttctgttccatattttattatatgttccgggtttagaacaggatttggtgcttgcattttatctgttggagtatattgtttatatagtttaaaaaagagaataggattgttacttgttcttgtttcttgtttgattcattatatgtattttatctattttggattgatattattttctttctgtgttggcagattgacgaaagttaaaattgtgtttttcttgattatatcattgtttttgcaatgtttattgcttaaaattagtggaagtctagattttgaatatttatcgttaatagggaatggcgattattctgattatgttcaaggagaatggggacttaattatggatggaatgcaaaaaaatttatttctatcatggcgatgtcttgttttcctttaattgtacaagtattcttttttagaaaaatgattaatgatagtggttttagtaaacttatctttttgaatgttttgttttatattataatctctccatatagaattcttttgtcaagatatagttggtcccttattttattgataaatatatatatactttatcatatatatgagtattgtcgaatgagaaaaatgatgcttttgattattttgacaacattgattatttctttttctgcttcttggagagtgaatcgtttttctatgccgtttagtcgccaagaagaacttttatataaaccattaccattgttgctgatgaatagttatagtttgaaagaagcatctatttatctttcagtcgatggtgaatttagatagcctatttatgaatgatttggtttcaataatagtaccagtttataattctagtccttatttgaaggatatgttatgttgtattgtgtcacaaacatatcaaaattgggaattgatattagtggatgatcattctagtgatgattcattggaaataattaaagaatttcagaaaaatgatgataggataaagttatatataagaaacagattgcctaagggagctcagacttgtagaaatattggctttgattattcagtaggagattttatcattttttttgattctgatgatttagttgaaagtttttgtttggagcaaagagtttcttatctgaatctatataaagactgcgattttttgacgtttcctgcaatcggttttgtgagaagaaaatacgacttgaattcgtttataaatggtgtagataggcatgtagatactctgtctttattcctgtcgaggagaattccgtttgttgtttggaataatatttatagaagaaaaagtataataaatctgagtttgttttgggatgaggagatcttatcttttcaagattcggattataatattcaatctattttaaaaggatcgaaaatgaaatttattgatgctcctgttgattattattggagaatggggggtaatcaaaaatctattcataaacaaataaataagagtttagatcatttatattctcattgttgttttttttaaaaagatgtcatctgttcctactctttgcaatacggataaatatgatttctatatattaaattacgctttgtattttataaaactaagtgctatatataattctagtgaatgttttgataatatagttgataatgaattgataagatctaataaatttttctattttagattgcaatttgtaagatctatcttgttgaataagatacataatatatatgtttgtaaaatcatttttttattattttttcctgtaaggcaaatttctaattttatatatcgaatcttatttgaatatgagagtatgagaattttaaaaagtagaatctaatgcttcttacttattcttttgacatttttgatacctgcctcgtccggaaatgtggatcttcggataatatcttttgtatatgggctgatcgtgcgttggggaaggttgatagatcttatctgaaagatttgattaattcccgtttaaacgcagagaaaactgcgcggagaaattccggcaaggaggatgtctccttggatgatatataccgtaatcttagcttggaatctttcccgaatttgtcgaaaccagctcttaagcggttggaactggaggtggagcgtgagaatttatctccagtgcggcaagctttggatctgattcggaactatcggaaaaagggtaagcggatattgttcatatcggatatgtatttgccttccgatttcctgaaatctcaattgcggagatttggtttctgggaagaggaggatcgtatatatgtatccggagagatcggcttaacaaagcattctgggaatttattccggtatattcaaagagaagagaggatattgagatgttcatggatacatgtaggggataatacatatagcgattattatgtacctaagtctatgtttatacggtcaaggaggatttatcatccttatacctctttcgagaatctgtggcagaatgatatgtggtctccctataagaaattcttgccttcttatttgtcgggattggctcgggcttatcgattgtcccttcccgcttcggatcgtttggcttttttcgtggacgtgttgttggttccttatttcttgtttgtgtataaggttttgcgtgatgccaaggatagaggcgtggacaatctgttttttttggctagggatagcttcgtttggtatcggatggcgttgaggctgcgccatttgtttttggggatgaattttcattatctctatatatcgagaaaggccgtttttgtttcttgcttgtatgacttgtcggactatgagcttgagttggtcttttctgatacgataggctatactcctcggcagttgctttcctcgttggccttggaggaggacgagatgctgcaggccttttgtgcggatgagttggatgagcctttggattcgggaaagcgagtgcggttttatgacaggataaggtcttcttccctagccaagattttattggagaagtccggggaggctaggcgcctgctattatcctatttgcggcaggaggggttcttgggcagcgaaaagccggggatcgtggatatcggctggaagggcaatacgaaccgtgtgcttaactatatattgcgtcgggaggaagacacgaacgcttacttgtcgtttttcctgggggtgaaagagacccgccatccgatcgcgagcataggggattatgaggcgggatattatttcgaggattatcttgatgagccggagtatgcctataacttgtttgccttggtatatgtattggagaattatttctcggcctcggacgataccacgctgtcgaggtatcgagaggaggatgggacgatatatcccgaattctcgcccggtatcatctctgacgcttctaaggagaaaaatcaatatatcttgcgtttgacggagggtttcctggatctcataatggagtccggtttattgcgatacgatccctcctctctcttcggagacgtaggggtgcccaccttgctccgtttggcttcccgcccgtcgatggcggagctgcgggtcttgagggagcttaccttcaatgatatttatgtaggtgacaggaaggtcgttctgaagatgtatccatggactatctgcgactatgtgctcaagaagctgaagaacaggaaaaacgataagtatatattcacatggtttgacgcctcgattatttatacctatggattcctgtccgggcctatattgaagttaaagaaaaatatattatcagattcattgattcatttattaatcaaaaaggtaatttcattatggaaataaaagagttcattcaaaatttcgccgatcagttcgatgatactgatgcaagcgtgtttacttcggaaacgaagttcaaggagttggaagagtggtcctcgttgacggccttgtccgtgatcgccatgatagatgaggagtatgacgtgaagatcaagggtgacgatgtgcgtaattcgcaaacggtcaatgatctttacgaaatcgttaaatcccgtctctgatggcttttctggaattcaagaatgtacggatctccggtatctcagctggagttccgaaacatatcgagtacaataaggattatccctattttgaggcaggtgaggcggagaaatacatcgcctccacctccattagggagaggcgtatcgctgatcccggggtttgttcctctgatctttgctattcggctgcggaacgtcttatagaagacctaggttgggataaatcggagattgagtgtttgttgtttgtctctcaaacagcggattatatattaccggctacggcctgtattttgcaggaacgtttgggattgcccgagagttgctacgccatggatatatccttgggctgctctggttgggtttatggtttgagcgtgatcacttccctattgtctacaggacaaataaagaaaggcttgcttctttccggggagatctgtcatttgcaatcctcaccattggataagagtgcctatcccttgtttggggatgccggaaccgccacggctttagagtatcaagtaggatatgagcctgtccgtttttatttttctacagatggaagtgggtatgaggctatcattatccgtgatgggggttatagacatccttttgataaccaatcattggatgtttatacgactccagaaggattacgaaggacacgtttaaacacggagatggatggcatgagcgttttctcgttcgggataacgaaggctcctcaaagttttaacctgttgatggagcgcttctcgttggatcgagagtccttggattattttgtgatgcaccaagctaattatttcatgaataataagatccggaagaaattaaaattaccggaggagaaagtgccttactccatgcctctttttggcaatacgagtagtgcctccatacctttgacgttggtgacagcctgttcgttgagaacacggaggagtaagatcgcagtttgtggtttcggggttggtctgtcttggggaaccggttatttcgagttggatgagaatgtagtgataagtgatttggtcgaaatataaataattatgagttataatccatattcattagaaggaaagacaatattggtaacgggagcgtcttctggtataggaaaagctacggccattgaatgttcgaaattaggagctagagttgtaattacgggacgtgatgaggctcggttacaacagactttaagttcactagaaggagaggggcacgttgtgattacggctgatttgggagaagatgatgggatacgattcttggtagagcgagttcctgttttaaacggcattgtacatgcggctggtatcagtgatacggttttatttcaattcttaaagaaagagcgattggagaatatattcaacataaacttttttgcaccagtagtattatcgcaattattattaaagaaaaaattattacagaaagggggatctattgtttttttgtcctcgatagatggcccggttactgcgcatattggaaactctatgtattcagcaacaaaaggggctctttctgcgatgatgcaaaacatgtctatagagttggcttctaaaggaattcgggttaatgctgtcttaccgggaatgactgaaactcctttgatacataatgatgatattactcaagaacaactgaataaagatatggagctttatcctttgaaacgttatgcggatccccgggagatagcgtgggcaataatctatttattgtcagatgcaagtacatttactataggtgccagccttgttgtcgatggaggttttacgattttataggttatggcgatactgaaatatacggatgtgggaattcattcggtctcagcttgtgttcccaaaaagattgtacgaaattcggagttgggttatctgatcccccaagaggatttggataagaccatccattccatcggtattcgtgagaggagaatagcggagtgggatgtttgttcctccgatctgtgctgtaaagctgcggagcggttgctcttggagcatggcatcgatcgggactctatcggggctctgatctttatctcccagactccggattaccgtcaaccgtccaccgcgccttccttgcaggatcgtttgggcttgccgaaaacggtgatggcgtttgatatcaacatggcttgttccggatatgtgtatggattatccatcgcttattccttggcctcgcaggatgggataggacgtgtccttttgctggtgggagagaccatgtccaagaccgtatcggatcatgacaaggtgacgacaccgttgttcggtgacgccggtaccgccacgttgatagagaaaggcgaggggtatggcccctcctgtttcgtgcttcattctgatggggggggctcggatatgctccgcatgccgtacgggggataccgaaatcctagtagcgcagagggatttgagcgaaaagtggatgaggtggggaatatccttggcggtgagcagttgcacatgcgtggaatggatgtcttcaattttggtcttagggttgttccctcgggcataaaggagatattgaaaatcttggatatgagggtcgaagatatggatatgatccacttccatcaagccaaccgtttcatgacggatttcttcgccaagaaattgaggttcccgttggatagggtaccgtatagcttggagtattttggcaatactagtgccgcctccattcccttgaacatggtccataccatgtatgacggcagtttcccgagacggcggcatgtgcttatggccggttttggggcgggcttggcctggggaacggcttatctttccttggaaaatctaagaatctcaaagctgatagaatattaagatgagatattatatatttcggaacaacacgcttgagcctttgttcgggaatctggatgctcgttactccggctatggggatatctcctcgctggaagagggagcggatcgctatatctggttctaccaggtccctttcgggtttgataggtgccgtgtggcggaggaggtgttgtcctatatcgataagttgaggtgggtaatagaaaagataccggcacataagagcgtgctggtcttctccttggttgatctttgtccgtttcaatgggccggttcagaatgggaggtacaggagagcatagagacctataacaagtatctacgctcgctcgcctcggagaggagtaatgtccggtatgtggatctgccggatttcactcgccgttattcttccagtcaattatttgactggcgtttctattttatttcccaaatgggcattaaccctaagctggcttccgacttttcttgctggtttgaggatcgtttgagggagataagcctctgccggaagaagtgtctggtattggatctggacaatacgctttgggggggagtcctcggggaggacggtatagatggaataaagataggaggtgattatccgggcaaggcgttcctgtattttcaggaaggcttgttggaactggccaagagaggtgtcatactgacgatctgtagcaagaacaacgagcgggacgtgttggatttgtgggagaagaatcctttcgtgttgttacggaaggaacatttctcggcttggcgtattaattggcggaacaaggcggataacataagggagctttcggaggagctgaacataggtctggacagtctcgtcttcgtggatgataacccgacggagcgtgagttggtccgccaaatgcttccgatggtggaggttcccgagttcccaaaacagtcctatatgctacccgatttcttgatctccttgtcggatcgttatttccgtgtctattcggtgacggaggaggatcggcggaagaccgagcagtacaaggcgaatgcgagtcgtacacaggagcgaaagaaatttgtggatttcgatcagtatctacagagtctggagatcgagatgagaatcgaaccgatgaactcattcaatgtttcccgtattgcccagatgactcagaagacgaaccagttcaacctgacgacccgaaggtgctcggagtcggatctcatgggattttcctcggagggctggttgatctattgtctttccgtcaaggatcgtttcggggataatgggataaccggagcggtattgttgagacctatcgatggggggtatgagatcgatagtttcttgctcagttgccggattctggggaaagggatagaggaggctttcttgtccggtattcttaatatactgaggaatagaggtgttaagctcgtaaaagcgtcttatattccgacagctaagaatatgcaagtttcaggcttctatgagcgaaccgattttgtcttggatagccaggataaggacggaagcaagttctaccatttgaacatgggtgcggagataaaaatcccatcctattataaaataacatattgatagtatggaagaaaagatattgttcgtattaaagagcgtgctaggattggagagtgcgacaaaagcgttatcccaacagaactgtgataaatgggattccttgcgccatttgaatttgatcgtggagttggaatccgagtttggtgtcgagttcgatccggaggagatctccgggatgaagtgtttcgaggatatagaaagggtattaacgcaaaaactgtgatatggattcggtcgtgaaaaaaaccggagagttatccgatgcggagatagagtccataaatacactctttttcgaggtatttggcttgcaaagagatatccttacggttcgtgaggagtgttttaatgctccattgggatattccgtacatagtttgatgtatgacaagggcctcttagtcgcttattatgtatatatgcctttttattataagaagaagggtgagaaattcattgcggctctaggttttgattcaatggtaaagaaggaataccgggatttctttactttttatgagacggaaagggcttgttggccttgtctccgaggcatagggtgcaaattgttgtttggtttcccgaatgacgagtcttatccggtgatgataaaagggtttaaggtaaaggatataggccgtttgaccacttatatccttccgatcaagattggtccgatcattccgaggatgagatggcttgatcctttctttagacttttttcttggtctttgatcaagatgtcccatttatccaaagggaaaaagattcgttcctttgtttttgagaaggatcgtgagtctttcgataaagtccgttatagatggaataaggggcaatatgaaatacgggatataaaaggctgtaagtatgtttatcgaatagaggatcataaagatcgccatcaaaattttaatccagttaagaccgcttttcttttagatgtatatcctatgaaccgctcaaattttgagtttgcggtacgatccatataccaagagcgatcaaaggatattgatttgatcatgtatgtgggggatttagattttgttccggtttcattgattaagatacctcatagatttgaacctaaacattttcattttacttgtaatttgattgacaaatcatattttgatgatactctatatgatataaagaattgggacgtgaatttgtcaagttatgatttagtttgataaaggatgaatatcttgactttcgacatcgaagactggtataattgtgattttatatcagaggattttgactgggatagacacgaggttcgcatatatcaaggggtggatcgcattttggaggagttggataaacgaaacttgaaagggacgtttttctgtttaggttggatagccgaaaggcatcctggtgtgattcgttctatccaaaagcaagggcatcatattggttgtcattcgtatcagcatgagttatcttttcgcttcaatgaaaaagacttcaaaagggatactgctatggctaaatcgttgatagaagatctaataggggaagaagtgaacgcctttcgtgctccggggttctcgattactaaaaataatacgtgggcacttcgttgtttgggagagttggggttcgagtatgattgttctatgttccctgccccccatgattatggtggaatgcctagttatggaatgggtgttccgaaacggatagacttgggtttcggtgggtttatcaaggagttccctattaatatacaagcaatatgtggaaaatatatcgttttctcgggaggaggatttttccgtttatttccttattggctgattgattattgggctaaggattgtacctatatgatgacttatttccatcctcgtgattttgacacggggcaaccgattatccgatccttgcctgttatgagacgatttaaaagttatgtgggtattaagggtgcttttggtaaattccaacgcttgttgagccattatgactttatgagtgtaaaacaggctgactctatcatagaatgggataagactccgttggtcaagttggaagacttgaaatgacatgccgtaaataaattcacgatgaatatattaataacagggatccacggttttgtgggttccaatctggttgttgccttgaaggagcgtcatggcctctatggtttggatattgttaccccggaaaaggacggtgtgataaagactttttcttgggatgacttagataaggagatgccggaatttgacgcggtgatccatttggcggggaaagcgcatgatactaaaaataggaatgccgcagatacttattttaagattaatacgggattgacccaacgaatttttgattggtttttggctcggccttctatcaagaaatttatctttttttctacggtaaaaagtgcggctgattctgtacaaggagatatactaaccgaagaatgtgtacctgttcccataggaccgtacggtgaaagtaaaatcaaggctgagaactatatcatcgagaggtttgcgcctgaagcgttaggcaatttgtatcatgcgtttggagatagttctatctatcccggcaaacaggtatatatcatgcgtccttgtatgattcatggcccgggaaataaggggaatttgaatctgttatataatgtagtgagtaaagggattccttggccgcttggggcatttgagaatcgtcgttcattcactagcgtacagaacctctgtacagtgatagaaggtttcttgactcaaaaggtagagagcggcatctatcatatggctgatgacgatccgttgtctactaatgaattaatcgaggtgatttgtgaggcgttgggtaagaagacgagaattttgtatatccctaaaggggtaatgaacgtgatggcagagatgggtggatggctacatcttccactcaatccgtttcgtatgcagaagctgacagagaattatgtggtaagtaatgctaaaataaaaaaggctttggggttacaaaagatgccggtatccgcaaaagagggattggcttgtactattcttagctttaagaagtgataagatatgaacggcttactttatgtgctgattttcgctttgctattttttgcggagcttttttatttccatatagcggataagtttaatatcattgataaacccaacgagcgcagttctcatgcctctattgtcttgagaggtggtggcgttatctttttactgggtttatggacatgggctttcttttttggattttctgcgccgtggtttcttatggccgttaccttaattgggggcgtaagttttatagatgatgtacgtagcttgcctgattctgtgcgtttggtggcccaattcattgccatggtgatgatgttttatcaattggatatattgcgcctgaatatgtggtgggtgttgttgttggcgcttatcgtttgtgtgggagcttcgaatgtcattaatttcatggatggtataaatggcattacggctggttattctctatcagtattgcttccattgatgctggtaaacgagaagtccggttttgttgatccgtctttgatctacgtttcggcacttagtgttttggtgttttgtctttttaactttcgtcccaagggaaaggcaaagtgcttcgccggagatgtaggttctataagtatagcctatattttgctgtttatgataggcagtctgattattaagacaacggacgtgacttacttggtctttttattggtttatggtgtggatggttgtttgacgataatacatcgcattctactgcatgagaatctaggtcaagcgcatcgtaaacacgcttatcagttgatggcgaatgagcttaagattggtcacgttaaagtgtcgttggtatatatgtgtttacagttggcggtttctttggcatttatctatgtgatacctgataccgtaacggcacattggttgtatttgttggcggtagtagtggtggtggcgttgttgtatgtggtatttatgaaaaaatactattgtttgcatgaagaatatttagcttcgattataaaagagaattaagttatggtttttatgtggattttacttgcttacatgagtgatacccccctgatccttatgtgctaaggatatggcctatatcgttaattgtttaaagaaaaatatattgagattattatgagtcttttttctcgactatctacctggtacttttccaagaaatccttaccctattggggtattatcttgctggattgctgcttgatcttattttccggcttattggtgtataccttgaataatggtgtgttgtcgaccttggatatcttaggacatctattggtcacgctattggtatgcctgattccttatctggtaggctttcgcctgttccatacctattcggggattatacgttattcctctttcgtggacttgcaaaaggtgggattcgccgtcttgtttggcttgatttgcgtggtcgtgtttcaggcgttgacggacttttctccttatttggtgtatatccgtaaacgggatctgatcctctctgcgttgttggctatgagcttgatgtggatgatgcgtgtgttcgtgaaatatttttatgtaagtacttttcgtgtggctaaggcggaacgagcctttatctatggcgtgaagcaaggtggggtgagtttggcgaagagtatccagaatcaggatccggcccggtttgtgctggctggatttatctcggacatggctgagattgggaatcggtatttaatgggagtcaaggtttatccgaataacgaggatttgattggtgtgatgagaaggctgcaagccgatgtcttgctggtgtctccattgaaagttgaggcgatccggaataatcaggagatggtggacaggctgatcaaggcgaatataaagatctatatgactcctgccgcccaagagtgggacgggaagagcgacttgagccatacccagctgagggaggtgaatatagaggatttactgccccgtgataagatcgagatagacttggaggctgtgaggaagcagcttaccggtaagcggattctgataacaggagccgccgggagtatcggtagcgagatcgtgcggcaggtagcccagttcgccccggaacgtatggtcttgatagatcaggcggagacccccttacacgatgtccgcttgatgatggctcgtcagtggtcgaatatagaatcctatacggttgtgagcgatatttgtgtgcgtgaacgcatggaggagctattcgaggagcatcgtccggattacgtgtttcatgccgcggcctacaagcatgtacctatgatggaggataatccggaggagagtgtccgtaacaacgtggacggtacccgggtgatcgcagacttgtcggtgaaatacggcacgaggaagttcgttatggtatcgactgacaaggcggtgaatcccacgaacgtgatgggctgctcgaaacgtatttgcgagatctacgtgcagagtttggatcaggctatcaaggatgggaaggtgagcggtcgcacgcaatttgtgacgactcgtttcggcaatgtgctgggatcgaacggctccgtgatcccgttattcaaggagcagatcaagcggggcggtcctgttacggtgacgcacaaggatatcattcgtttcttcatgttgataccggaggcttgtaagctggtcctagaggccggtacgatgggtaatgggggtgagatcttcgtgttcgatatgggtaaacctgtacggatcgtggatctggctgagcgtatgatccgtctgagcggggtgaagggaatcgagatccggttcacgggattgcgagacggggagaagttgtatgaggaggtactcaatgaggaggaaacctccaagcctacttttcatccgaagatcaagatcgcccaagtccgtgcgtatgactatgctgacgccaatttgcggattgatgccttggtacatgcttgtgccgtggagggggatatgcagatcgtgaagcggatgaaggagatcgttcctgagttcaagagccagcattctaaatatgaggtgttggatgaatagagcgaaataaaaagtaaattatggatttatccgtgagggcctatgctattaatgttgatttaaatatagcgtcaaaaaagaagagcctccccagaggcatttgcaagaaaagagaaagaaccatgtgggttttgtgatgaaaagataggatgatagagattttgtagaatcgatataaggtcaaggttttgtaccggtcttcttttcccgtaaagggatttagaaggccggttctgtttttatatatgtatttgaaaatccgtatgtaagtacggtgtccggccatatgcggcgcagggataaacattccccctgcgttcgcatgatgaaaaagatctatgagcgtttgagagagagattggggcataagcccacggtgaagaattttgacgcgttcttggtaacgttggggccggatgagcgggagtcttggaaaatggatgtgtgtagtttgggatatggggattattataggaagatgcccggggcgtaccgtaaatttatccggaagtatatggagcatgaccgggagtgcgaacggtgttatatacgtaagtatacggtgcgtggtgatttgttgtattccccatttcgtccggaactcttgttggagctagtgaagcttgtggagtttacggatcgtgagactcccccttcctccttggaaatagcctcttgcctgttgatggggtttgattatccgggctcggtgcgtggcttggcttctcatttgcgagaggcggggcattctgcggaagcagtcttggtgctcgctggaaagagggaggtgacggatgagttttaaaagagatatggatttgaatgttagttaagaatagcaggtttttattgtctttgaaaagaggtatttttggttttttttatttttaattagttgaatattacttgtttgatggataaaactacgaacgttcgtctcttctgggccatcttacctttgtgtcgtgctccataaggggtatataaccataaaaattaaaagatatggcacaaggttttaagttggtgttgcgtccgtcgaagccgggcgagaaggattcagagaaaaagttttatgcggtgtcgaaaacgaatggtacctctagtatgaaaacgctatgtaagttgatctcggcacgtagtacggtgtcgtcggcagatgtgaaggcggtattggataaccttaatttcgtgttggatatggagcttcaggagggggcgtatcgtaaggctcggcgatttcgggagttttcggatctcggtgagcagtgatggtgtaacagataaaaaggatttcaattcgagtatgctgcgcccgccgcgtatcattttcactccgggaggtgagttgaaggatacgaagaagacactggagtactcacggatctcccaagatggtaccactgcggaggctggtggctctgatagtgatagcccgagtgagatttaacgtgcaactggtaatggccgtgctactttgcgtggccggccttaccttagtgttctgtggtttttgggtggctccttccggtgagatagataacagcgtactggtcgcatttggggagatctgcacgtttgccggcgcgctgtttggggtggactactcttataaattgaaaattaaggattgaaaatttgagttaagatggaaaaggatgagaagagattgacagagcattttcgtatggacgagtttgtttatagtgcgatggcggtggaacttggacttaataatgcgttgccttcggaggtaataccggcgatacggaatctaacggtgcggttgttggaacctttgcgtatatatcatcgacagcctatgtatatcatgagtggctatcgaagcgaagagttaaaccgattagtgggaggtgcccctagctcgcaacatatgaagggagaggcggtagacatttacacggtggatcgcaaccgactattggaggacttggtggcaagctgcttgaattttgatcaggcgatcctttatcgtacgaagggattcatacatctttcattaaaaaaacatggggtgaacagaaaacagattttatttaaagaggagggggtatgagtggattttggaaaaaaggatactatatattgtgttttatcgtacgtacattatataacttgttaagccttgaaaaaaagcctaaaaaataatgcccgataaatttggatcgtatgttttatagcattacttttgcacccgctttcgagagagaacggcgcttcagaaatgatgaaaacgtggaggtatccttgggtaggggatgaggttggctaggccaagcgataatttccaaccgcccggagatcggcttgagaaaaaaaacttgaaaatttttcaccgaaaaatttggaggttaagaaaaagtccttacctttgcagccgcaatcgagaaacgatagcgacaagagttctttgatagatttacataattcaacaagtagtacaagtattggagaagagattctccggattaataccgtcaaaagaagtatgactttggactacgataaacggattccggagcgaggatatgataaaacaatttaaacaacgaagagtttgatcctggctcaggatgaacgctagcgacaggcttaacacatgcaagtcgaggggcagcacaggtagcaataccgggtggcgaccggcgcacgggtgagtaacgcgtatgcaacttgcctatcagagggggataacccggcgaaagtcggactaataccgcatgaagcagggatcccgcatgggaatatttgctaaagattcatcgctgatagataggcatgcgttccattaggcagttggcggggtaacggcccaccaaaccgacgatggataggggttctgagaggaaggtcccccacattggtactgagacacggaccaaactcctacgggaggcagcagtgaggaatattggtcaatggccgagaggctgaaccagccaagtcgcgtgagggatgaaggttctatggatcgtaaacctcttttataagggaataaagtgcgggacgtgtcccgttttgtatgtaccttatgaataaggatcggctaactccgtgccagcagccgcggtaatacggaggatccgagcgttatccggatttattgggtttaaagggtgcgtaggcggccttttaagtcagcggtgaaagtctgtggctcaaccatagaattgccgttgaaactggggggcttgagtatgtttgaggcaggcggaatgcgtggtgtagcggtgaaatgcatagatatcacgcagaaccccgattgcgaaggcagcctgccaagccattactgacgctgatgcacgaaagcgtggggatcaaacaggattagataccctggtagtccacgcagtaaacgatgatcactagctgtttgcgatacactgtaagcggcacagcgaaagcgttaagtgatccacctggggagtacgccggcaacggtgaaactcaaaggaattgacgggggcccgcacaagcggaggaacatgtggtttaattcgatgatacgcgaggaaccttacccgggtttgaacgcattcggaccgaggtggaaacaccttttctagcaatagccgtttgcgaggtgctgcatggttgtcgtcagctcgtgccgtgaggtgtcggcttaagtgccataacgagcgcaacccttgccactagttactaacaggtaaagctgaggactctggtgggactgccagcgtaagctgcgaggaaggcggggatgacgtcaaatcagcacggcccttacatccggggcgacacacgtgttacaatggcgtggacaaagggaggccacctggcgacagggagcgaatccccaaaccacgtctcagttcggatcggagtctgcaacccgactccgtgaagctggattcgctagtaatcgcgcatcagccatggcgcggtgaatacgttcccgggccttgtacacaccgcccgtcaagccatgggagccgggggtacctgaagtccgtaaccgcgaggatcggcctagggtaaaactggtgactggggctaagtcgtaacaaggtagccgtaccggaaggtgcggctggaacacctcctttctggagcttcaggattccgtaccgaggtcatacgaggtattgatcccttgtgctgctgttgagattatgtttatatatagatcttacagaccgggaggccggtcggagagaaaaagatgacgctgggacgtaagtcttggcaaagttgacagtcctatagctcagttggttagagcgctacactgataatgtagaggtcggcagttcaactctgcctgggactactccgaatgagggggattagctcagctggctagagcatctgccttgcacgcagagggtcaacggttcgaatccgttattctccacagtttattgagagggataggcatcagccaatcccgtcccgacgacagtcgggctcagtaagaaggatctttgacatgttggacatcaaaaagaagaaacaagtagagcgagcttaagatatatcaacccgtgcgtcaagtacgaggtgagagaaagtaagcaagggcagacggtggatgccttggctctcggaggcgacgaaggacgtgataagctgcgaaaagcccgggggaggcgcaaatagcccttgatcccgggatatccgaatggggcaacccggcaggctgaaggcctgccatcccgaaagggaggcgaacgtggggaactgaaacatctaagtacccataggaggagaaaataaacaatgattccgtaagtagtggcgagcgaacacggaagagcccaaacccatgtcgtctaggcgacacgggggttgtaggaccacgacgtggcaagatagagtcaagtggaacgccttggaaagggcgaccgtagagggtgatagtcccgtacacgactgacgattgaagcctagtggtatcctgagtagcgcggggcacgagaaatcttgcgtgaattagcggggcccatcccgtaaggctaaatactcccgagagaccgatagcgaaccagtaccgtgagggaaaggtgaaaagaaccccgagcaggggagtgaaatagaccctgaacccgtctgcctacaagcggtcggagcgtcgtaatgacgtgacggcgtgccttttgcataatgaacctacgagttaccttccccggcaaggttaagtacctaaggtacggagccgaagcgaaagcgagtctgaacagggcgccaagtcggggggggtagacgcgaaaccgagtgatctacccttggccaggttgaaggttgggtaacaccaactggaggaccggatgggtaagcgttgaaaagctttccaatgagctgagggtaggggtgaaaggctaatcaaactcggagatagctcgtactccccgaaatgcatttaggtgcagcctctttatagtatatcgtgaggtagagcgactgattggatgcgagggcttcaccgcctatcaagtccagataaactccgaatgcgcgatatatatttacagggagtgagggcgcgggtgctaaggtccgtgtccgagaggagaagaatccagaccaccggctaaggcccccaaatgatcgttaagttgaactaacgaggtcggatcgcagagacagctaggatgttggcttggaagcagccattcatttaaagagtgcgtaacagctcactagtcgagcgatctggcgtggataataatcgggcataaacgatctgccgaagccgtggatgtcgcaagacatggtaggggagcattccatgcggcgtcgaagatgagggatgacccttgttggagcgcatggaaaagcaaatgtaggtatgagtaacgataaggggggcgagaaacccccccgccgaaagaccaaggtttcctgatcaacgctaatcggatcagggtgagtcgggacctaaggcaaagccgaacggcgccgccgatggaagaatgggttaatattcccatactgcctcatggagtgacgtggagacggagaagtgacagtcctgccggctgacggaatagccggttgaagggtgtagatattgattcccgtaggcaaatccgcggggagagtcgaacctgagagtatacggagcgcttgcgcaacgtaatatggacgtaaccatgctcccgagaaaatccgctaaacttatccatgcggcacccgtaccgtaaacggacacacgtggtcgggttgagaatactgaggcgctcgagtgattcacggttaaggaactaggcaaattgaccctgtaacttcgggataaagggtcctcgtcgtaaggcgaggcgcagagaataggtccaggcaactgtttaacaaaaacacatggctgtgctaaatggaaacatgatgtatacagcctgacacctgcccggtgccggaaggttaagaggagatgtcatccgcgaggagaagcgttgaattgaagccccggtaaacggcggccgtaactataacggtcctaaggtagcgaaattccttgtcgggtaagttccgacctgcacgaatggtgtaatgatctggacactgtctcaaccgtgagctcggtgaaattgtagtatcggtgaagatgccgattacccgcgatgggacgaaaagaccccgtgaacctttactatagctttacattgagtttgggcagacgatgtgtaggataggccggaggcattgaagcaggtacgccagtatttgtggagccgacgttgaaatacggcccttcggttgtttgagttctaactcctagttaggaggacactgtatggtgggtagtttgactggggtggtcgcctccaaaagcgtaacggaggcttctaaaggtgccctcagaccgattggtaaccggtcgcagagtgtaatggcataagggcgcttgactgggagacatacaagtcgatcaggtaggaaactagagcatagtgatccggtggttccgcatggaagggccatcgctcaaaggataaaaggtactccggggataacaggctgatcattcccaagagctcatatcgacggaatggtttggcacctcgatgtcggctcgtcacatcctggggctggagaaggtcccaagggttgggctgttcgcccattaaagtggcacgcgagctgggttcagaacgtcgtgagacagttcggtctctatctatcgtgggcgcaggagatttgcgaggctctgacactagtacgagaggaccgtgtcggacgtaccactggtttaccggttgtcccgccaggggcaccgccgggtatctaagtacggatcggataagtgctgaaagcatctaagtacgaagccggcctcaagattagatctccctcaagggtggttatagacgatgaccttgataggccacaggtgtaagggcggcgacgtccgagccgagtggtactaatagcccgggactttcctcacagtgaaggttgatatattttaagacgataaggcgaagctggtctcttcggattgatgtccggtcaaaatcttgataatgatattaaggtggctatagcacgagggatccacctcttcccattccgaacagagaagttaagcctcgtcacgccgatggtactgcgtaacagtggaagagtaggtagccgccgtcttgagaaaggcgaaagccggaagagagaggagtcagtccgtaaggggtgactcctttttctgtttttatttattcgattctgattggataaataaaataagatgtatatattcgctccctataacttaataatgtgttgtatggttaagaagtggatattccctttattgattggggtttgtttaatcaatacgtctatggcacaagaaaatccgattttattattcccaaaaggggcgccgggagaaactattaaattaatagagaaagctgatacggacggtggaaaaaccggtggtgagagtattttgcgtattacgaatgtaagtgagccaacgattactatatatcatgctccggatgaagtggcctcgggtgccgctatgattgtctgtcccggtggtggttacaatattttagcttatgatttggaaggtgatgaagtctgtgaatggcttaataatcttggaataactgcggtcttacttaaataccgggttccaagacgagaaggactggaaaaacacgaagctcctttgcaagatgtacagcgtgcgattggttatgttcgagcgaacgctgagaacttgaatatagatccaaagcggatcggtgtgatgggattctcggctggtggccatttggctgccatggttagcaataattttttgaaacgtacttatccggctattgatgctacggataaagtaagttgtcgtccggattattgtttattggtttatcctgcttatttagatggagagaacttccaattggcaccagagttaaaggtttcatctgccacacctccaaccttgttaattcaagcggaagatgataaatcttatattaacagtagtattttctattattatgccttaaaggaagctggtgttccggtatggatgcatttatatagtcaaggtggccatggatacgggttacgagatacgggagcgtctgtaaatgaatggccggatcgggctgaagattggtttcgtgagatcggtctaatcgaatagaactccagatatcttttctggagacttgcggagtagattctaaaatcgattgcgcaatttatttattactagtttattattgatggtaaacgtagtaaaagcgtagtctaggaaagcgtgttctatagcatatcgtatctttgaagtagtgagtttattgctgttttctgttattcgggctttttttgaagtaaaaaagctaagttatgaaattccttaaaagttcagttttatttatttcaatggcatgtatagtgcctgtttgttcgatagcgagagaaaaaagtgagagaatcacaagagctgagattgaacagaaaagtgcggatgaatttataaatggtctgatgagtcgaatgaccgttgatgagaaaattggccaattgaatcttcctagttatggaaacgtaatgccaaatcctaaaaagagtgagatagccagtcgtattgtacgaggagaggttggtggtatatttaatatattcggtgtcgatgcgatccggcagttacaagaagtcgcggttaaagaaagtcggttggggattcctataattgttggcgctgatatttgtaatggttataaaactgtttttcccattcctctaggtctttcgtgtagttggaaaccggagaatatagaagaggtcgctcgaatttccgcaaaggaagttggtgctgatggtatctgttggacatatagcccgatggtcgatatatctcatgatgcccggtggggacgagtaaaggaaggagcgggcgaggatccgtttcttggaggtataatggctcaagcatgggtgcgtggttatcaaggcaatgatttatcggctgatacgactcttatggcatgtgtaaagcattatgcgctttatggagcggccgaggctggtcgggattataatacggtagatatgagccgtgtgactgccatgaattattacatgcgtccttatcaggctgctgtagaagcaggagtaggaagtatcatgacttcattcaacgaatttgaaagtatccccgcgaccggaaatacttggcttcttaatgacgtgttgcgtaaacaatggggatttaacggctttgtcgtgtctgattttacggcaatagcggagatggtaaaccatggaataggtaatagtcaggaagtcggagtcaaggcgctaaaggcgggtgtcgatatggatatgatagcggactgttatcatgccgtattaaagaaatcattggaagaagggaaaataacagaggctaagattgactctgcttgccggagaatactaatcgcaaaataccaattgggattgttccatgatccatataaatattgtaatccgaaaagagccgccaaagagttcttgtcggtaaataacgtatctgcggcccgtcgtattgcggcggagtctttcgtgttacttaaaaatgataataatctgcttccacttaaaggatgtcgtaaggtcgctgtggtcggtcctttagcggatagcaaggcgaatatggctggatcgtggaaatatgatgagcagactaaatcttatcatggattggtagaggatttacaggaatctttgggaaatggagtagaggttgtttttgcaaaaggcagcaatctagtcgatgattccgtctatgaagcaaactttacggatcaaaatcgttcaacccgggatgatagaagcgatgaacaattaatcgccgaggccctaaaagtggcggaaggcgctgatgtgattatcgctgctttgggtgaatcgatagatatgagtggagaaggcgctagtagagccatccttgaaatgccgcaaacgcagaaaaaattactggatgctatccaaaagacaggaaagccgatcgtaatggtactttttaccggaagacctttggcattacaatccgaggaaaagcaggtgaatgcgatcttgaacgtatggttcggtggtacggaagcaggagcggctattgccgatgtcttgaccggaaaggtttctccgacggggaagttaaccatgtcttttcctcgtgtaacaggccaatgtccgatctattacaatcataagatgacaggacgtcctatgtctcccgatgcttggtacactcgttatgtctccaattatatagatgtgttgaatgagcctctttatccatttggttacggtttgagttatacgacttatacgtatggcgatgtatctttgaatacgaattctatggatgcaaatggaaaaattcaagcatccgtgattgttaccaataccggggctcaggatggagaggaaatcgtacagctttatttacgtgatatcgtacgcagcataacccctccggtccaagaattgaaaggattcaagcgagttgcgttaaaagcgggagaaagcaagaaagtaacctttgatattgatgtggatatgttgaaattctacgattcaaccttagattatgtcgctgagccgggtgagtttcaggtaatgatcggtggaaatagtaaagaggtgaaaacagcttcgtttacattaaaataatcctaatcgtaaggaatcagttatggggctttgctaaattcgaaattatatgtatctttgccaaaagaaatattacaaaaccatggggatgaccggttttgaaagacctatccgaaaaatcaaagaaaataagagtaaagcaaaagctaaataaaatactaaatattagtgttttataagtaatataagagctaaacaggaacaacgtgttttcctttgtttagctcttttttttgttacttttgttactcgtttgttacccgtgaacggaaatgttacttatctttacggtgggtaacaaataaagtaacgatatggcaaagcaagtcaaagttaaagagccggtacgtattcgtacaaagaaactggctaacgggaatgaatcgatctacctggatctatacaaagacggtgatcgtgtgtacgagtttctcaaactctatcttattccggaaaaatcaaaagcagataaggaagcgaaccgtaaaacgttagagttagctaatgcgatcaaggctaaacggatcgtagagttgcaaaataacgaacatggctttaaaacaaatactaccagatcaaagatgaatcttattcaatttgtcttacacttggcagatgaacaactagcaaaatcgggtaacaagcgaagttattattatacgcttcattcacttgctaagcatttagaggcttatgctggtgataaaatcacctttacaaaggtaaatacagagtttgttaaagggttcattgcttatcttcgtactgcaatgaattttaactatgagaatagtgaaaagaaatcaaaatatgaagttctttcacagaatactcaacataatctatacaaaaaatttgcttgggtaattcgtaaagcgatgcaagctgatataatggcgattaatcctcttgataagatagataacacggataaacctaagccggaggatgggcaaagggaatttttaacgattgaggaaataaagaggttgatgaatacaccatgtgaagatgatatgttgaaatgcgcttttatcttttgctgtttagttgggcttcgttacagtgatgtgaagaagttggtctggaatgatttgtatgaagataatgaaggtgccattatccttcggattcgtgtgactaagacgaaacgttgtgaggactttcctataagtaaagaagctttgaaatggctaccggaaagaattggctctggtgatgagaaaatttttaaattgcctaaaaatgataattcaaaccggaaactaaaacattggtgtaccttggctggtataacaaagaatgtcactttccatgtggctcggcatacagcagcaacattgaatcttagtttaggtgtaccgatagaaacagttagtaagctattaggacatactaagattagtacaactcaaatttatgcaaaagttattgacgcaaataaaaaggctgctgttcataagcaagacggcgtatttgattgatccttagtaaatagaataataagtatcttaaactaatcatacgatatgggtatacaagaaagaccatttgaaaatattataagcatgaataactcattatcaggtgatcctattaatgagttaataacactaaataaattagagagaagtatttatagtgaaggtcgaaaattggaaactattatcttgttatctggtatgacaccaaaagatagatggatatacatttctcttattcttgatgatttgttatatcaatatgatatctcttgtagaaaggttagaggaatgaatgctaatactttgttatataaaagagctctattattgaagaaagcaatcgtggaagtgatggaagtaacaagcacacgattaaaaatagcatttgatactggttatataaaagaaagagaagaaggatatgctacaacgggggctgccagatgggatgattcaaccgataaaaaattagatttagatatagtagaaagcatgcggtattttaatgatttaatttcggggaagattgatagatatttggaaaattgcaaaagtcggtttacgaaaaaatatgacgatgataaattaaaagctatctggcttcatttgaaagaggaaaattatattaatagtaatacaagtttagatacgtttctttatttatttgggaatatcgataatgtgcctgagcacttttatattgaatggttagtttcattgaaggaattgcatgttcttatagatgtgttttggaagtcagagcgaaataggtggaaaaaggcaagtgaaatatttttatatggtgataaatttttgaactatagaagcttaactactgctgtcagtaaggaagatgatattgaaaatatagaaaaaaaatttgcatgttggttaaaagagaagtgacactctttaggtgatagtaggtgattttgggtgatactttttattatcaccctttttagttgttttttaatatgatctttgttgtgtcaatactgagtaggtacatattgacaatatgtgaatatgctgaatctacctacattcagcattaagatatgataattaaaaacaaaaaaaatggattcgattaaaaatatcttaaaaagaatagagtgtaatactctacttgcgacaaagacagtactaactgttgatgatgtagcaactcttactggcttaagtaagagtcatatatacaagcttacatatagtcatcagatacctcattacaaaccatctggaaagcaagtctattttgatcgctcggagattgaggagtggcttaaacgaaatcgtgttgattcggtagaagagatagagcaagccgccattaatcatgttgtaatgaataaaaaaggaagggggagagtatgaaagatgagatagcttctaaaatctatgtcaatctatcaaggggtgagaaaggacatgattcatgtactgaatatagtagtatgttgcatgatatggtacatggtcatatgttatatgatacggttgactttgttcttaatcagaaagatgttccagaaatagatttgttagcggaagtgtcgccatatttgatgaatagaagtgattgtattggtaatgatggcctcccttatgtacgtgggaaatataaggggtataatgtgtatgtaaatactcatactctaaaaatcaatgcttgtagcttatgtaaatattactacggtaccaacatgcacgatttccctttagaggacgtacggaaagccattgggaggataggagaggatttaaacatccctatggataaggtcactgtgactagaatggattcagcaatggatttggagttacagcggtctccaatagaatatttcaatcggatgttagatttaccttattttaggcgtctttcatatcctacaggaattacgtttcaaacagcagagaaagaactttcgttttacgataaaggaaaggaacaggggagtaataataagaatatagctcgatgcgagtttcggataaagaaagttaggaggtgctttgggagatcggttactgcgtcaatgttatatgatcctagcttttggaatgatttgctggatcggttcttatcttgttattccaaagtcaaggtgagtaaagagtctttaccgcttgataagataaatgggataaagattttgaaagattgtgccttatgtgattatgttaatcgtaatggatttgatccgttgaggtctggatttaaggctcgtgtacgtgatggagaattggcgcaaagagcctgcaagtctattatagaaaagatcaagaagtgttgtttctcttctcaaggaaaagacgttgggccagagatagaagaatttgatgtgaaattcaggtcatttttgaagttaaagagatttgattaaatatcattgttttgcccatatttgagacttgcaacgtatctagtcttaattttttcctaataaaatgtaggaaataatacccttgtcggggatctgtcaaataaatttagagaggtgggggatatttccggggaggtggtatctctcacttcttttggttttagaggatattgttctgtaaacgatttcccaaaaaagaatcacgataaaacggaatttagaaaatgttcgttatatttgcgtgaggtaatcactaaaagatgaaacaacagataattaataagctaagaggctttttctctttgcagccaatagagaaagcgtgggtgtttggttcctgttcacgtggagaggagacgaaggatagtgatattgatattctggttcgttttgactcccacgctcgtattacattattcaagtatgcgggtatggtggaagctctaagccaattgttgcatcgtaaggttgatttggtggaggaaggacaattgaaggatttcgccgtttcttctgtagatcgggataaaatattggtatatgagagagaagcctaaagacgatacacgtctacggcatatgctggaggcgataaataatgtcattgagttcacgacagatgtgacttttgaggagtattccaggaacaagatattgcgttttgcggtcatcaagaatttggagattgtaggggaggcggcttatttgattacaaaggaattccgggaggaacatcaagagatcgcatggaatgaggtcataggcatgcgccatgtgttagtgcatggatattatcagattcgggatgagattgtgtggggaaccattcaaacagatctatttccgcttaaggataagatagaacggttgctctgtaaataactcaatgtattgttttagacaataaccctttattgggggggatatcaaataaatttagagaggtgggggatatttccgaggaggtggtatctttcgcctctctcatttttaatacgatcactatcaaccaagttaccaatctcgtacttttcggcaaactctgctatgcgatagtgcatgttggcgtataaggcgtttttaagcccgttttaggctatataaccccgcccctatatttctcatgtgttttcttgaaatgttttgtgagtagctttaaataagattctctacgattttctttgccctttgttttatatgtaatacatttgcgatgtattgaaaataacgtagaagcgttaagatattatcctatctctggaaactggacattttcatcacacgggataatagccaagatgctcctgcgcttatgttgttatatactaccctgtaaaggagaactatatacctcataaagcgtggggctattgtatattatcgtgtgatgggcagtccagagcctcagagataataatatcaatagtcctcacgcttcttttatttagaaaccaccgaacgaaggggacagggaggaattatttatgtagtattatgataaacaactatcgattgttaatgctaacaactttccttttaatttgtgtcaatgttttttcacaaactccttttgataaaggctttcgagaaggatatgttgatggatacatgtatgcggcattcgaaaacaatgatttgaatgcaatcaagccaataccacctatacctccattaccttcaattcatgaatccattaatagttggagaaatggatatgatcgtggatatattgctggctataaatcttataatagtgcaggatcctctaaaaatcctagtgctgcggggaatcagattcttcgtacctatcctaaatataatgcaccagacttggatttgcttatggctatagctatggcccaagcccagaatgagtccagtaatgctagacgttattattaccgtcctagaaatcgctctcaaagtcgccctaaaaggaccaagaaaaggattttttatattgattttgcgtattcggtaagtggtatttctggaccggcttgtaatttgatattagatgggcaggtaaaagaagactattttcttttaggtgttggtgttggtatggtttatcagaaagattgggaacctaaaaagaaagattgggtatggtatccttcgtatgcggaaaatccggatgatttgatttctttaccgctttttgtggatatgagaagttactttttgaaaaaacgtttttctccgtttatagctcaaaaggttggttatgcttttgttctaggaagagattataatatctcggggttctatagtgacacatctgttggttttaggtttttaacaaaaaggtctcgtggtataagtttatctgcaggatatacaatgcaagggacaaaagaccaacgaaacatacaaggatatgtacctatggaagaaagctcaacatcgggtataaatataaaacttggatttgagatatagtagaataaagaaatgcctactgcttacacattgagcaagagttccggtgtgtaaatgctaatatatttaacccgttggcggaattaagtaatagagtggagatccccggttgaattgaatcctactatattcaaggatgatctttagggggtatttggggtacgaatggctttatttggcgtggatcggggcggcaccaaaggaggaggctgcgagtggatgcggaaggcggcggcggggacaccagccccgttttctcttgtggtgcttggcgatgaggatatgaaacatgagcctattccttgcggattaggatgataacatatcaacgttgtgtatgatttaccgtatatcgttccttggaacgtaaaagatagccatttgtttaaaatagaattttgatgttgtagattcttcatagtcattgtttgattgacgatagttaaactagggtgcatagttcccattttggtgcagcctcaatcattttgtataatgggacaatatcaataggtggggtgattagttgaatacgtaatagtttcgtatggctggatcagaaacaatattataaagagaaggctgtggtaaatcggatgctgtggatttttggacttatatttgtggtaataaaaacatgtgaagaaaaagagttaataacagatattagtttggtatgaagacaagtaaatgctttgatcgtgcttcttgtagctgggattgtaaacctcggatcacgggtttaatacatgatccggttgaggaatcagaagcctatttgtccatagagaaggagttggaggaaaagctacgatcttacttctctgataaaaaaattgattctggtagctggtttcgtaccccggtctcatgtttcgagtattggcaagtgatgaaacgttttttatgggaggactatcgaatagagtggagatccccggttgagttgaatcctactatattcaaggatgatctttagggggtatttggggtacgaatggctttatttggcgtggatcggggcggcaccaaaggaggaggctgcgagtgggtgcggaagacggcggcggggacaccagccccgttttctattgtggtgcttggcgatgaggatatgaaacataagcctattccttgtgaataaggggtgacaactgataaagggtattatagatctgtcctatatcgtgccttagagggcaaaagaaacggtctgaatacgagataacactaattaaaagaaaggagtaaggtcgtgaatatggtaaaaacgaggtttttgatcttctattcgatagtgtgtactatggtattaaataagttgttcctaatttgaggcgttatggtgtttttggtgttagcttgtataagtttgattatctttgaattatcgttttttatgatccttgcattcaagacaaggccggagcgatggacatttaagtctttttgtctttggttggtttctttggtctcgtggtgttgttttccaccattgtacgtgtggattgagcggaagtggcggcaggctagtctaagaaggatgctatttgtgctgttatccccagtctcttttcttttcttggtggatgcctgtacgttcgatccgcatcgcttcatccatagccttaatagcctgataatagatctcaatgctattaatagagactggacagggattgatacgctgttatctctaatctctcttatttatttagtatatatctgttcattggtatgtaagtgcgtcaataagcctttctataaccgaagagatctttcaagcaaggtagggataggggcagcatacaagattgtaaattctcatggccgaaatggggatacggatgaggttgacattaggtttgattcgggttgtgaaacggagagttccaacaaaggatgaagacgaatcccccggctcattggagtatatcggaagatggtgatttcccattcgatgagaattagatgatggaatttacttctttatggatatagatcctagagagaataaggcatatatgtgatatggagggacttcgataattggagtcggaatgattttcgccatacaagatccttggtggtaggtcgaaaatgaaacaagttaccgatgataaatcgagtttttttgcaatctttgtgttaaagaatttatgtatagagagaagttagccatgatgaaaaatacttacagaactatctatggagcgattgctggtgatattataggttcgatgtatgagtttcgttctgtcaagagcaaagacttcgagttgtttccgtatggtgcctgttttacagacgatacggtgatgacattagctatcgcacgatggctaatggaggatgtcacccgctcagaatacacgcttgtagacactatgtgtgaatttggcaaccgttatccggctgttggctacggtggccttttctgtaattggttatgtaatgatccaaccccctataactcatgggggaatggttccgctatgcgtgttagtgcggtaggtcttgttgctaagactttggatgaatgcttgcgcttagcgaaacaaacagccgcagtatcacacaatcatccggaagctataaagggagcgcaggctgtagctgcaagtatattcattgcgctacattggactggggaaatagacgaattaaaagtacacataagagattttgttaccaatcagttcgaatataacatgaaccgtacattgaatgagattcggccccgatatgaatttgatgtatcttgccaaggtagcgtgcctgaggctatcatcgcatttttagaagccgatagttatgaagatgcgataagaaatgccgtgtcactcggtggtgacgctgatacgcaaggtgctatagctggcgcaatagcggcttgtgtttatccaattcctgaatacattattaaagagtgccagaaacgtttatccgatgatctgttgaaggtcgtcatccgttttgaggattatcttgacaatgaatggcaaaataagattagtttaccctgttcgtgcttgcaacccaagcgtgaaacggttgagtctgagaaatatgtagatattatacgagacaatattgatttgatacacaaatcaattaaaatcgcagtggtgatggttgcatttatattggtcaaaatattatgggtttactggtcgtgtactgataatggtacatgggaggatgagaagggggaactcattcaacgtcgggatttcctgatcgatcgtgtagtaacttcaccacgtgcgttgttgtgtgaaatgccagaaggaattggaacacaatttcaaggtgagtgggcgttgtattcttgttcaatgctggcggcagccttattcaatatgtcgaaactttatcccgaaacaaaaacagagaatctagagaacatagataatcttattgagatggtactttcctttgagttgagaaaatatgatgctgagcgttggggcgaggatcctctggaaacattggatggtgacaggagtcatatttcatatatcagtcatcttgcgtggatgataagcgagtataagatggccggaggaaatgataaatataataacttgtttgatgatctttgcggaactatgaatcgtcggcttcttcgaagtaaaagtctaaacttaccaacatatccaagcgaatgtatatatgtccctgatatgcttgttgcgattgtcgcactgaataattactcgaaattaaacaagggaaaatatatttctacggtacgtaaatgggtacgaaaggctaaatctgaatggcttgacaaagaaacaggcctacttgtctcatttttgagtgaggatggcataccgtttaaagccgccccggtgaaaggctcgtactccgcattaaactgtctatacctcacgcagatagattcagtatttgcaagagagcaatatcataggctcaaatcccattttttgcaatcaggtttattgtctggtatacgggaatatcatgattattcgtgttggttgggatttgacattgatgcaggcccggtactgttcaacctcagtccatccggaacagcattcgctgtgggggcagcaacatatttcaatgacgtgagagtacgtaataatttcttacgtacggcggaaattgcaggacatagtgtgatgtggaacaatactcgacattatttactagcggaaatagcacttgttggggaatgtatcatgttggcaatgcgaacaacaactccataggaaagaaatggaactttatatgaccatgtgatttaattataagggatagctgccctaaatagaaatgtaagtgttatagatctattttatacagaaccttcgagtgcaaaagaattggattggatacgagattatgataattataaagaaggagtatgaataaggtaaaatagtagttcttaatttgaggcgttatgatgttttttttattagttagtgtgatagtttggggtggtgggttactggctttcataatccttctattttgggcaaggccggagcgatggacatttaagtctttttgcctttggttggctacttgggtctcatggggatgttgtccgcctttgtacgtgtggattgagcggaaatggcggcgggcgagttggagaaggtgttcttatgcgctgttatcccctatctctcttattagcttaatatatgtttgctcgtttgtatcagatatcgtcaataagccgtatgggagccgtatggagatctcatacaaggtaggtgtaggattgccagcgtacgaggttatagatcgcacctatggaaaaaagtcgttcactttggactatattgatcggatagatattaagtttgaaccgggtcgtgaaacggagagattctattggtggatgaagacgaatcccccggctcattggagcatgtcggaggatggtagtttttactttaatgagatttcggaagatggaaccttcttcacaatgcgtatagatccccagaagggtacggcatgcatagaatatggagcgtggtagataactggggttcgattgttagggggaggccttgtacctgtggacggcggcgagagtcctttacccccctttgtttttcttttggtgtttgattgtataggctatagttacgtaatcgcttagcattatatgttgatttatgtgtgtcttttgtattattgagaataattcctatatttgttgtaataaagtattttccctttgaatatcaacagattgaataaaactcgcacgagaacgggcaacggataagaaaaagctggactgtgtagaactgccatatttctcatgctttcaaataactctttaattcgattacaaagataacatttctattttaaaggacataataaatgacttcaatcttatcggataagattgagaaaaatataaatattcagtagccgagtccccataaccacaggcaaaggtaactcgtgttctactcgtccaagcaaggccaagcccttcgggttcgtggaaaaaatcatcctcgcccgaagggcttgcggtattttttcccgaagccttgcatgtacggaacacgaccttttaaagcctgtagttatgggaactccggccccgaaatgccggactaacaaatattgattgttatgttacaacagatggcaaaagacaagtacagtatcgaaacactcagagaattgaatgtttcatacgaccgtgaacattggcttacgcaggatgatgtggatatggccaacaattacgtgcaactcatcgaacggacacgctcggaaatcacaccgcaagtcggtgacagagtggtatatgtcaccgagtatggagattattacggacatgccctaatcgatcacattcacagggatgaagaacgcctgtccgtatgcgaacggccctatgtgccttttgtatggaaggaggacggaagcatccgtctgagtgtcagcggtggagcattccaccgtgtaaacccgaaggacatgaaattcctgaaatggacggaaggtgctttcaaggattggggaagctgtggagcatgtgccaacggctcggtcacatttcttgccagagtgccgctatggttctatgccgaaccaaatccaaagtatggcaattacactaccgagacctaccggaagttttacctgaataaaagaatggatacggaagaaggcaacctttatcaaagtttcgatatcgctttcagggatgaaaccgatttcagacagttcctggaagactatgaaggaacggtgttcaagggaaactgggcaaatcaaatcgtggtatggtgcttccgtcatgaaaaccgttttatcacgcaagacgaatggaataaaattgatgaaccggctgttgaacggagattcaatttttatcctgaacaagtcaagatagtcaaggacatggaacagcacatcacgtacttctaccggatcaagccgcaaaatttctaacatcttaaattacaaccgatatgcagacaacaacatcaatcaaggccggtaacgctcccgacctgctttccggcattctgagcgtacaagtaagaaacgaggaaaagattaccgaacaggacaggctctattgccagtcacagcaggatcttctgtacaagacactcaaccagatagaaaagtggtatgccatcttcaaggaggatgcggaacagtaccggaaagaaagacagttcaagtacgaggacaacggcaaggtctccatccgcgacttttatttccacaacgggcaggatgattattcgcacaatgagttcaaaccgttcaacctcattaacgaccttgtggacaagagccacaatgccaatgcgaactttgccaaccgcatcatttcctatttcaacaagacctacaatgtggatgtccctgtcccgaaaattgacggacagacattgcctatgggattcagaccggtctaccagacctatgtggattctgtcatcgaacatctgggcggaaagagtttccgggaaactgccgaggaggaactgctggcccgtttcctgaaaacggtacgaccctcacgttggagcaaggtcaaacccgagctgaaaaaggacaagataacatttcctgatatcgtatattgggacagcatccatctggaatatcacggtgaatacgaattctcatacgactgtagaaacaaggtgaacatcttctgtgaaggtatagcctacggttcggatgacctgataaacggctcaaccggaatggttatcggacttgacgagcggaatgtggacatcacacagtggtactgtcttaccacggacaatgcccggcagatcaaattctacaagaacggacgcatcgacatacggttcaaagacagtccggctgccgaaaactgttacagacggctccatctggacgaaatcacgctcaatgaagattgattcatgaaaagtttaatcctgcaccccgtaaggcttccttgcggggtgtttctgtttttaaccatcaaaaagtaaaagcatgtatgccatcataccccaacagattccccgggacaagcgtgccgaggtgaacgagaaaatcctttttgccatcgattccggcaaggacctcattccgaaggagagcatctacaactgctacacaggtatcggaggactgcacaatctcaagcaggcagatttttccagctatcacagatatgcggaagccaagaaagaattcgagatgggccagtttttcacccctcatgagctatgccggagcatggtggaggtcctttccccgacctcttcggaaatggttcttgatatgtgttgtggaatgggtaacttcttcaaccacctgccgaacctgcataacagctacggctttgacatagacggcagagctgtaaccgttgcaagacacctctatccggaagcccatatcgaaaaatgcgacatacagcagtaccgcccggaacaacgttttgacgtaatcatcggcaacccgccattcaacctgaaatttgactgtaaactttcacaggaatattatatggataaagcatacgacgtgctcaatccggcaggattcctgatggtcatcgtacccgtgtcattcatgcagagtgaattttgggagaagacacgtgttgccaatatcaacagcagtttttcctttgtcggccagaccaaactgaatccggatgctttcgattccatgggagtacataacttcagcacgaaagtcatggtattcctgcgcaggtcacgccacatcgaaatgcaaccctacaatgcggacgagttcattccgatggaagagttgaaagaccgcgtcaggaagacaagggtgatgaagcagagaatccggattgacctcatgcgggaaaccaaccggatagaccgagaggaactggaagcgttcgaatacaggctctccaagtatatgtatgagctgaaagcccatgccgtactgaacaggcacattgagaaggcagaagcacttgtatccaagttccgcaaccaaaaaccaccggaaaatgccacaaaccagcagatcaaagactgggaacgtaaaaaattgaccacaggcaaggtgctcggaatcatccgcaagtacatcacttcccagcattcagtaccccgcaaggaagtggcactggtgaagacctcctacggtttcaaactcaaaccatacgcaccccgtctgcttgacaaagtcacacacaaggctgcaagcatcaacgatctcattctcgggagggctgaacttccggtaccggaaaccgtaacggaaaggaacaggcttcagatccgtgcggcggagaaactgatacgccggaagcagaaacagtatgagatgcagaacctccggtttgcggatatggaagaagacgtcaatctgaaggaatatctggaccggagcacattcatcaacaaggacggcgaggcatgtgaattcacaaccctgcaaaagcatgacctgaaccttgtacttcaaaaacgctatgccctgctgaactggcagcagggatcgggcaaaaccgcggctgtctattaccgggccagattcctgctcaaattccgaaaagtaaggaatgccatcatccttgcaccggccattgccaccaacatgacctggattccgttcctgtcggtaaacagggaacggttccgtgtcatccgggcagagagcgaccttacaaacgtacccgaaggcatgttcctcgtcgtttcaacctccatgctcggcaaactgaggagagggctggtgcgctacgtgaaacaaacttcccggaaactgtgtcttgttttcgacgagtcggacgaaatcacgaatccgacttcacagcgcacaagaaacatcctgtgcatattcagaaggctcaagtataagattcttgacaccggaacgaccacgcgcaacaacatagcggaactgtacagccagttcgaactgctttacaacaattcggtgaacatggtgtgctggagcccgcaggtctatcacgaaaacaaggaacgtgagatagaggaagagaacaatacggattacgggactccattcccggccttcagggggcacgtcctcttccgtgcctgccactgtcccggaaaagccaccgtattcggcatcgagaagcagaaccaggatgtctataacaaggaggaattgtcggaacttatcggcaagacggtcatcacacgcaagttcagggatttcgcaggagaaaaatacaagatacagacccataccgtcagtccgtcggatggagagcgtgaggtttaccgtgtcatcatcgaggaattctgccgtatctgtgagctgtattacaacagtacgggtgatgcgaagaaggatgccggactccggctcatgcggcagatcaaactgctcatcaaggcctgttctgttccacacctgatagagggttactccggtgacgggattccgaacaagacaaagtacatagagaaactggtgcggaagatacccgggaaagtggctgtcggctgtacatcgatagccgcatttgacctttacgagaaccatctccgcaaatgctttcccgaccgcccggtattcgtggtcaagggagacgtggcattcaaaaggaggcaaaacatcgtaacggaatttgattccaccatcaacggcatactgatatgcacacagcaaagcctgagcagctcggtgaacatacctgcctgcaatcaggtgatactggaatccctgcaatggaacattccccgcatggaacagttctacttccggttcatccgcctcgattccaaagaaatgaaggacgttcattatgtcacctatgaggactcggtcgaacagaacctgatggcactggtactgaccaaggaacggctgaacgagtttatcaagacaggagaagtcaaggaacagtccgagatattcgaggagttcgacattacgatgtccgtcatcgacagcctgcttgtccgcacgcaggaccgtgaaggcaaaatacacatcagctggggaagccagcgaatagcaaactgaatatgaaccgtatgaaaagaaccgggagttccattcccaccgacaaaggtagtccgtgtcctccttggccgtgcaaggtcatgccgcaagcggttttcgggaaaatcatcctcgccaaggctgcggtattttcccgaaaaaccctgcacagccgggacacggcaccttctcgaagtcggtggaatggaatccccggcattcgcatacataataatgaaaaggatatgaatctaaacaatgcagagattgccgtgacaacacagcatctcattgacataaagaattacagggactactggctgcacatgtctgactacagtgatatgggcgaattcctgtgtgcctgctcagacctgttccccggagaggaagaaccgcaataccggtatcccaaatgggagaatatccctgacatactggtcagtcgtgaatggctctgcccaaacttcttcgaaatcagggatgcccttgaaaggctcgaagaggaagaaaccgaattcttcatggactggagcaggaattacggctatgacatcagtacggatgatccgcacatgattgtctcgcactatcatgaactgtacggagatgccgttgccgagaaggaagaggacactgctgacttggcagaagatacgctgatatatacaggcatatcaagcagctattgcgacatgcttcccttccgttacgagatatttgatgataattacaattaaatggaaaaaatatggaaatcaactttaaaggacctgtcatgcccattgacccgtactcacagctggcattcgtcgagattctgaacatcatactgacggcaggacatatcgtggatgtaaaccgtttcctcatcagaaggaacgtcaacccccggttcggctccctgtcaggttatttcaggtggtcgttcgccgaagaccgctttacgctctggcaacgtacggactacaactccacgatgtgtttcagccacaggatactggacttgcccttcggtgtcctggccgcaaaagacaacgggaaagaaacggaattcttaaactgaaaggaggacaacatggaaacgatattcagaatacccaacagggaaatcgcaatggctgcattcgagagcctacgccatgagggaaagaaggatgcggcgctgaaactggccggtgctctgctcaagcacacgtacatcccgctcggtataggtgatacagattgggaaatagatacggcactgcgcaagtacggaggtgagcctgtaacgggatatgggtatacggcatatttccatttcagcggagaaacagaaatggaaaaagagaaatacgaaaaattcatgaaagaaaacggatagcaagggagcggccgcaaggtcgctctctgcatttataaccacatgtacgggaaacagaatcctgccgtacacaggtaacgaaaatgaaagaacagaaaagactgacaatggaactcgtcaagtccctcatggacgaatcctacacactggtgtggacggactacaatgacaaccttgacaatcatctcgacctgattcatgaatgccttgcaagtaaaagccaagaaaaattgtgggaaaaggcagatgaatggtacagagatagcgaatgggaagcagttcgtgaaatcatcacaagactgaagacggaatgtaccgcaggcttccatgttgatgaaaagacggtggaagctttctttgaagagcacgaagatgaaatacgcgatgagatatacggtcgcaacgattcggatgtccttgcggagctgataaagaatacggatgacatccctgtccgtgtggagatgctttccaattatgactgcatcaactccgactggtttgagtcacagggcggctaccggtatgaagaaagctacttcggggatatggtagacgcgctgaaccttaatccggcaagtgtgaagaagctcctgacggagcatggctgcaaggtttacggacattttccgaaccgcaaaggaaggaacggcaaggaacaggtatcctatgaacaattctaccaagaactcatcaactcctgttgcggtgccaacctgttgacctatatcggcagggtaaatctgaaagaactgtacgaatccggattctcaccgggtgaagttgtcattcccaaaggcaactgctgcgggcttttcagttccgcttacggcggtggcagcctgcttgaaatggagctgaaacaggatgtcaggttgaaattggaaatcaacggctaccatggtttccgtctccgtttggacgaggaacggaacaagtatgactattccatcggacatgtgtatggagtggacgattctttcttcggtgagaggataagccttgtcacttcggacgggaagaaggaacagcaatcaaacatataatatcaacaaccaaattataggaattatggcaaaatacaaagtaagagtaagatacaccttcgtgggcacttacacggtagcggcaggaagctgcgaagaagcaaaaagagtggtagaggaagactgcggtctggtattgggcggcaatatccacacgacatgtaatgaggaagaggtgacggactggaacttcggcatccatcccgaatcgctgatactctcgatcaaggaaacaggcaggaaagcccgggtgaaatacaccgcaatggatttcagcgaccggattgaggaactgcgcaatgacatcatcgaagcgatacggcaattgcttcaggcgtactcactgacggaactggcctttacggacagggaagatgatccggtatggatagtctggttcgggaaaaacggagacccgtatgaatgccgggtcacgggtgtccggataacggcaagcagcctgaccgtcattgccgaagagaaagaaagcggtgacgaagtggaatgctacggaccgtttgaactcggtgcaagcaacatcgactggctccgtgaaatatacgaagccgcgaaattggaattggaaacaccccgtcatgtcaaatcttaaaagagcaggatatgtatttacaggcagaaaacgcagtctccagtttcttcttctatatgtggaacgcctggagtgaggaagaatgcaaagccgtatatggcaacatgtatccgcatttttgggaaaaatggtgcgtggcgacggacaagggcacattcggtgcagcggaacggttctatatggaactctcggaagacagccgcaggcttctggtggagcgggccgtctcgatatatgacggacgacgcttcagaaacaggaacaggaattcgacctcgaccacaaggaatatgtcatcaaccgcctcgcaggggcataacagacaacagccatgacctattttcagaacatacattcgctggcagacttgaagaaagaataccgccggctggcattgcagcaccacccggacaagggtggtgacactgcaatcatgcaacgggtgaatactgagtttgaaaggcttttcgacatttggaaagacaaaccggatatatctgcgacttcaaccggatatgaatatgaccattcgggagccacagcaaaagaatacaccgaatatgtatataatgaataccgctggaaaggccgcaattacaagggacagcacgcaccggagattgtggaaccgctacgtgcatggctcaaggatacctatccgggatacaggttctcggtcaggcgcgagaattaccactccatccacatacggctgatgaaagcggattttgaggcgttcaccaaagaatcaggaaaggtccaaggagatgtcaaccactacaacatctcgtccgacaagaccctgacagaccgggccaaagaggtcatgcagaatatctgcgacttcgtcatgtcgtacaacttcgatgacagcgacccgatgaccgaccatttccacaccaacttctacctcacgttagggataggcagttacagacagccatacagagtggaactgcccggactcaagagcaaagacaaaccgcaagcgttcaagcatccggaaggtccggcacacaaggctctgcggcaggcattgggcaaagcacgctttgacttcattaccagcctcaggttttccggaaaactgattctcggagaggatgcctacggttctacgggagaacactatttctggccgaagcagtattccagtgccagaaacgcacagaaacggatggacaagctctcggaagtcggcatacggtgcagactgacggggtataacggagggtacatcgagttccttggctatacgccggaaacggaaaaccttttagaacaggaacgagaggaatacacccgcgcataccgggtctgggtatcagagcaaagtatatcccaaaagatgaaggcgataaaatacatgaaccattcagatcaaatccaactgcaacaaccatgaaaaagaaggaaatcatacaagaactgaaacgctacggctacagccgtgtgaacattgacacggacagaagaacctctaaaacattctatacctatcgtggaggtattcacatcaacggtacggaaaatctgtcattccacatcgttccgccaccggaaagtttcggactgggacggtttgccatatgcgctacacggaacggagaaagttcacagctgggaacagaccatgctccgttctttttccggcggctgttctcctttataaaaggtgagagaacggagcatgagatgatagatgaaatatgcaataaccgtccaactcgaatagcagagttgcccaactcgccacgctgagttgcccaactcacgatttcaagttgcccgactcacggaaatgggttgggcaatttgtctttccgtgcctcacagttctcggttcagcaccattgccagcgggaacataaactggttataggctttcagtttttgcaggttcagtacatatccggcataaggattgctcaaatcggtatagaagaacacatcggtaaatccggcgtgttcctccacaatttcacccgccaatggtatctcctccacattgaacagttccagaggcagttcctccagacgggcctgttccgcatttcccaacacattgaggttgcggttaaacaggacgaaacctttcttcctgtaatccacacgcataccgtacggacgctccacaagaaaagcatccgccgctttctttatatagttttccatgattctgaaattagaaattgcaaaaatacatcttttatccggcaatggcgaacaaatcaggaagagaatcgccacagcccatgcaaagcacactaccgtgtattttatttcccaccctgcaaaggtagtcccgtgtccggtgtacccggccaaggtcaggcccctgcggggttggctgaaagaaaatcatcctcgcctgacggctgcggtattttctttcgccaaaccttgcgggtactgccacgggacagtcaggcaggtgagaaataaaaataccggctctcggagccggacatgtttaacagataaatggaaatgaatcatgaaaatcctgaatcaagaacatttcgagaatgtaaagcattatgccgaatccatcggtgacacctcactccagaaatgcctggaacggttgaagagctgggaggaaaatcctgactgtcccagcgaaatctcactctactatgaccatgccccgtactcgttcggcttcacccaacgctatcccgacggaaggacaggcatcgtgggcggcctgctctatcacggaatcccggaccgttctttcgccgtgacactacagccgttccatggatggcagatacacacctgataaaaggcaaacgacagtattaactttataaaattcaattcaatatggaaacgacattggcagtaatggaaagacaacagcagtttgacttccaaaaaaacggaattgaagtgatgaacttcgagacactccaacgcacctataaagaaaatgacatctacaataacccggtgcagggcatctaccattatcaggtcatacgccgcatgatggacatctgtgagaaatacaatctcgattatgaggtggaagaaatcttcgctgcccagaacagaaacaagacacagccgggagtgagcatcctcccgcaggtagaacagacacatggtgaaaaagccgtggaagcccatatcctgcgccgtatcttcgctactatccggatcaaggattgggagacagacgagctgacgactacactggtcgttgcctaccatcaggacggcatacaggcagccataggcccttgcgtgaagatatgccataaccagtgtatcctctcaccgcagcggagcatctgcaattacgggaaaaagaaggtgacaaccgatgcgctcttcgaaaccgtggacggctggctggccaatttcaaagtgaacatgaacgaggacatcgagcggatacagcggttgaaacgccggattgttccgatggaagaaatctacctgtatatcggcctgctgacagccttgcgcgtttctcatgacagttcggacagaaacctgtcatccactgtggaaacctacccgctgaaccagagccagatttccatcttcacggaagaggtgctgaaactggccatgagcaagggacagattaccgcatgggatttgtataacgtggccactgaaatatataagcctggaaagacagactttccggctctcattccgcagaacggagccatggcggaactcctgctttcccgtctctccgaagaggtggaagtgcaggatgccgttccgataagctgacatgcgaacttctcaaataatcgtacaaaaccaaaaaataagggagaacctgacagtgataacgactgaaagattctcccttttttcatttactcttcaaaaagcagcatgaattccactttccttctccgttcgatgctcggaaccacttttcctttatagcacctgaaagagacatattccttgtaaatattacggtctcccgactccagtttctttaacagactgctctttggtcttttcccatagccttttaatctgtagggcccgacattatatgaaaggactgctgccaacaaagaatcacgccccagataactgaacatgcggcacagcttacggaggtcttccctcagaatagagtctccctgcgctttggagatgctgttggtaaacctctccccgggaagaaccttgtgaccccacccgacataaggccaatgctttttctctccatgccagccctcgaatcgcttgacacactcgaccgcaagactgaacctgtccggattggctttgaccgggttctccgcccttgacggcatacccggaaaaaagacggtggcacaaagcaccgtaaaccatattgattttaacctcataggcagaatcggcttagtgtctgattcttgtgacaggcagttgcttacctccaattggacctattggttctataggtatgataggtcctataggtatgatggtatctttttcctccgtctcgttgttgaagtcaaaggtcagcctgcaaaactgtgccggctcgctgttatcctcaaaatagatgtcgattgtctgctgatcttcgcattcagaagtgtagtataacctgaacacttccctgtcaaggggatagcggtcattgggcaacagcaccatcccgtcatccatgcggagcgtacccttgccgtccggctggaaatagcggatggtgtagcgggcatcggaaaaatgtccttcacgtttgagttcacagcgtatttccaccgtctcgcctttcacaatacttgtgggaaccggcagggtctccaccttgaacgggtaagactgctgtacttccatttcatcagaacaggcggacaacagcaaaaccgccagacccaggaacaggactgccaccattccggccaatcctctttttttattcattgcattcatattctatcagattttaatacgttatactttattcgatacttacaggaacttatgttgcaggtattcgttcaggtccttgtaacctttatacaaagaggaacaatccaccagtttatccgcatagcgtttacggagtgcctccagcgtgcgccgtccggcttcatcccgatccagataacagttgatcctctcatacctgtcaagaatagggaacgagcgttccagcaatgacactgagttcaacacaagataatcgtctccatatcccagaccgagttccagccacgaaaggcagtcgataaacccctcgaagaggttgcatgtgtccgaaccgttatccatcagtgaaatgtccttaggtgacaggctggccttgaaaaaccggttgcgcaactcgtatccgtcgctgacattcctgaatccgatggcgaaataccgtttcccgtgcaaggtatatctgacttcccgacagttcggtacagccacatcgctgctaatgccgcgttccgccagatatcggagcaggactctgttgtatagaggaccgaagcgtacattcgtgaaactctccttcttgatgatatcctccctgtcattcccatcagtgcgggaaacggtcttgtgctcgggggcgagaccgccccatgtctctgtgatgaacctggcctgcgccttgaaatccccgctgccgataaactccccggcaaggttgaatatgtcacctccctgcccggtgccgaagtcatgccagatttcctttcgtacattcacctgaaacgaggcggtgcgttcctcccggtacggggccagataccagtattcgtcaccccgtcttcttgccggttcatatcccatccttgccagaaaagcggtgatagggatagcttttatctcttctatagtcatagatgtacagttttaatggataatgaatttcacgcccaatccgaattgtgttgtaaacagattctgagaacttccccacaaggcacgttcccggatattggcaagcaggacaatacggtctgtcaggtaagtctcaagttccagggttatcgcaccgccatagacaaacgcatccttggcgagcagcgttgaaccgtcaaacagcatcctgtctccccaattcacggtttcatagccggccattgcggaaccgccgatggagagaaagaccgtcctggacgggtccgacaggaatttcaggtaatagccgccttctgccgtgaactgtgcgcagggtacattcacgttccggtacccgtaattcttcatcagatactcggcaccgatgacccaacggtcggctcttttggtatatcctgaaacggcaaatccggcataatgattcaagggggatttcgagccgttcgcaaatcctccgcgcagttccacgcccttcattccgggcaggtaccgctgggcatgtgcccgccccgggaacagggcaagcgacacggctgtaacgaataggaacagatacttcttcatgactactttactttaagttcgtttataactctggctctcacgatatcttcactttccacggtgaaggtctggtgccttccaccgcttttctcgtgcatttccaccaccagcaccttgtccgagggaatggtgaatttgtccaggacgaaaacagtgcgcccgtcctttttccctgcgacagttgttacatagtcgtaagcacgcaaaggaaatatcacctgctcctggatggcggtacgtttcatcaccttcttgtccacaatcttgaatgtcacgaaatccacttcataaggcacgttggaccggttcctgatttgtgtatgaaagtacagcagcccgttatgggtgtaaagaccgcgcagcagatattggatgccgaacgccttgctcccgatatgcttgatgtgccttttgttgtccttgtggacggacttcgagatgagatataccagtttcggagactcgctgccgagttccttcaggtaaatgtcaagggcgttgttgggacggttcacttcgcttccgtcatggatgaaatccttcatctcgatgttcagcaacaacggttcttccgcatactttacattgaatgcatagaaacttccgctttcggttatcacggacatgttggtctcctcacggaaattctttacggtagcctttacacggatgacattttccgcgccgtccgccttgcctgcaatgaggttcggcgatccgaggtccacataacgcaccgaagacgggaagatgatatgcgtggtcttgtcgtaagtcacttccagaccgtacggcggtatcatccggtcgaaagtgagttttcgggtcagtccgtgatagaggtccccgtcttcctcttttggggaatacacttccttgaccggtttgattcctttgttcaccaccgctgcactgtcggtttcagtctgggcaaaggcgcccatggtgccccctgcaagggcaagcattacaaataactttttcatgttgattgaattttaatgggttgtcattgattgtcattctgataaagcatcagggtatagccggatttgagatgcactttctcttcacgcatcttccgggagatgtactgcgagacaccctgtatggcacccttcccgagttcggaaagcagctggtcgcctgccgactggttggtgatggagatgctcgtgccgagattctgccccaaattggcggcaacctccttgacagcgtttgcttccatggatcccggaatgaagatgccttcttgtccgtcattgtcatacacggcaagtttcacggggatgatggtaccgccatattcaacctgaaggatattgacgtgaagcctttctccctgtatgcgcccttctccgatgagcaaggagtttttgggaaggacatgctttcctacacgcatcggttcttgcagtctcatcctcacgccctgaccgctgattacagtctggttcccgtggatgcaggcccgtatggtattcctcacgtctttttcatccctgtggccaatcggggtatggaatctttccgccaatgtccttcccgttaatgacacggaatcccggaccggttgcggcaacgatgatactacgtgtgtggaaaccaacccgacgggaacggctttcatgtttccatctcgtcctctttctccatcatccggatggtttttcttgtttttgccgccattgcccggcatgtacttggccgcaagctcgtaggacttttccaaaagtgccacctgttcctcatagcccggctgtgcattctgtgcggcagccgcctgcttcagctgttccacctcggctttcaaggcctccttttccgggtcttcctgcggtgattcgtaaaaattgccgagggtcctgttgatgtcattgtaagcggaaacggatgaaaaacgggcttcctcccttcggccggtttcatgcaagctgctttccttgtcatccgcatccggtgacagctgtacgcgagttccggagttctcgtccgaaatgccggagaagtctcccagcgtgcgcattttttctgcctgtttgcgctttatgtccgcctgttcgtaggcagcgatcttgtctccctctatgccggctcccctcgggtcaggcagttcggtattgaagcccgcattttttccctcctttcgtctgtcctcttcagacggtgcgaagatgaaccacatcgcaccaaggaagagaaggaacattcctgcaaaaaccagatatttcctgatttccagcctctgtctcaatttgtctgcattattactcattttcttcctgattgaattggttaaagaaatcttccatttcctgcattttttcatccggaattgtatcggcaggaacgatatccggaatgtccaacggggctatctcaatgatgtcccgctgtacatcctcccgtccgatgtcatagatggcacggaaaatcagatagaaatttccgagagcaaacaggacagccggcacgatgactgccaacattctcttttccggagaaagcccggcacacaaaccccgaagcttttctgcaacggtttccttgattcttacaaacatctgtttcatacattcgaaattttaacggtcatatactctgatatccctgttctccaccacacggaaggcttcaaggatgaaaccgtgcggattattgtcgctgcgggtggagttcagcagcctgccacgtgtgacaaggctgcgttcggttacactcttctccctgataatggagagtttcgcataggtcacgacttcatacggataggtattgaaatcgcacctgacactgtcaatcccaatccgctggctcatgttccccgaaatgatccggttgtaatatccctgctctgccagatccacataatgggcataggcagaacggtcgctgagaaacatcgcccgttggatattaccctcaatcgcgcttttgtcgggagacagcgtaaagaaaagttcatgaaacctcctgacatgttcccttgcctccaccgggcggttctgttccaagtcttgtgaaagggccagcatcaacgactttccctcatccaggacatagatcttctcccgttgcgcttccgcaaagctgtaagccttccatactgaaaatcccacaagaagcgtacagacacacagatagatgattccgaacaggcggaggtgtttgaaacttgtctcgatattcttcaatgatttgaattccattctgtaaatgttttatactgttattacctaaattcacttgaccagccttccggcaatgtttcccaccgccgctccggcacttcctgccaccacagagccggtcttggatgccgcctgattcacgttctttccataattgcccgcaccgcctccggcctgcacaatccagttggatacggtcgggatggtgaaatacccgataatgccgattatcagaaacgtgatgtaaactgcgtttgaactgtcagggatgaaatccggatcggaaagctgctcgatgtccctttgtagcatcagcacctgaattctcgccagcacactgctgaacaggtcgctgacaggaagccaaaggtagatgctgatgtagcggacgaaccactggctgagagatgcctggaacccgtcccagcaggaaagggcaaaggaaacgggaccgagtatcgaaaggacgatcaggaagaatgtcctcagcgtatcaatgaccagtgccgcagcattgaaaaggagttccagcagttcccggaaaaaatcctgtaccgattttttcatgttatacatggcacggtccacatacattccgcaggcctctatcgcatccaatgcgcccagttcgtccagtttgttgtcaaaagcctccttgtccaccagataggcagtctcgggattccgtttcatagcctccatctccagcttgtccttctgtgcccggtactcgttcatgtcaaaggtctggctttcgagaatcgtatgcgtgcctttcacgaccggtgacaggatgctgttcagcgtacccagtacaagtgtcggaaagaacatgatacagagtccaagggcgaacggacgaagaagcggaaagacatccacgggttcggcacgggccagagcctgccatacacgatatgccacatagaaaagagcacccaacccggcaagccctcgggcgacaccggtcatctgtgagcagagcggcatcatttccacatacagattctgtaaaatctgatgcaggttgtcaaaatttgcagccaacaataccataagcattcagaatgaggattaccaataacgttcgttcggtgaaccgtagagagccattacacggtccagatcgttccgtttcttggcacgcaggtaggacaccccgatattcttgttggtataatactgcaccaggctgcggttttgcagcatgtcgttgtagcagcggtcgatgatgtccatcctttccttgtcgttcatggaaagcccgttctcgttgactaccgtcttcaggtcgttcagcagatgggcactttcttccagcagtttggtgtatccaagggcaatggcactcagttcttccggtgtaaaatacgggtcgctgagcatacgctcgaagctggtgacatagatgtccgtgatatctcccaccatcaggatagtctgctggaccttgcgggcatcccggacaaggttcttgaccttgcgcaatccgtcataatactccttgccctgcttgtagattttcacggtttcctgaaaattgttgagcatattgttcgccgtggaagacgtatgaacaatgttcttggcggcattgatgatgccctgtgccagattgcccggatcgctcacgacccattgggcttgtgctgtgaagctggcaaggaagcagcccatgcacagcatgagaattttctttttcatgatgttcttgtttttatagtgaataatcctgttgaatatcagattccgaatttccgccccttggtcggcagattccgtgggatggcccgttgcgcctgtctcgtgcggttctctattcgggaatcctccctcttgcttctgatagtggcaaagagttcgtcagcatacggcctgcgtccggtcatcctgacaaaccgggcatccagttcccggtatgctttttcagcctgacacgaatgttccgtggcggaagcgttcttgtctatgccatatttggcaagaaatcccggatggacatgaagaatatcatgaacggattccggtatagcggctatctgccccaatctctccaattcggtattcagcttgtcgagatattcgaccgggggacggggacagagcctttcaaatagttcttcagcgcggtgtgtcagcctcgcatctatttccagcacatccggaatctcaccaagcagccttttctgcctgtattcatcattcttcatggcactgagctgatgatacagccggtaatcctccgtcaatccatagtgatcccggatgcgcttgggaatatcccagtcatacatcagagaccaatagaggcaatcagtcacttccctgagccacttttcatctgattcaaatctttcatgcatacatgttgcctttaaataggtttataaaaatcttatttccctcttttgctttcggccaactgcttgatagcaagctctatgttgccgccgagtttgtccgtaaggcgcatgagttccagtttttccgtttcttcagtggtgtagcacatatattcttcaagcgacacctcagtggcatagactgctgactgggttccgccgagaccaatccacacttccttgtatttgcgggaagggttgttggccatgttgatggaaagtatctgcgcacgctccttgtcggtcaagccgagcaaggactggatctcgtcaaacttgttcatgtacttgcgctggtcaaggagaatcttacagtcactgttgttgatgatagtccccttgacaatgggagaagaaatgatatcttccacttcctgggtcacgaccacggcttcgccgaaaaactttctgacggtcttgaagaggtaccgaagatattccgccataccttctttgctgatggctttccaagcctcttccagcaatatcatcttgcggattcccttcagttttctcattttgttgataaaggtttccatgatgataatggtgactatcgggaagagtactttgttatccttgatattgtccaactcaaagactatgaagcgtttattctgtaaatcaagctgcttatcggagttgagcagatagtcatactctccacctttgtagtagggttccaatacattgaggaatccccacacgtcaaaatccttctctcgggtgcgtttcttttccagaatatcctgatattcgtcacggataaactcatagaaagtattgaaagacggttctaggccgctgtccttgcggatcttctccagaaagagattgaccgcattggacaatgccacctcctcggcacgtgtcggcggttcgtcgtcacgcttccatagggtaaggataagcgtcttgatggattctttcttctcgatgtcgaaaatcccgtcctccacatagaaggggttgaaagcaatcggattattttcctcataggtgaaataaatcccgtcttcaccatgtgtcctggcatggataaggttgcacagcccctgataggaatttccggtatccaccaacagcacatgcgttccctgctcgtaatactggcgtaccatgtgattggtaaaaaaggatttaccgctaccggaaggtccgaggatgaatttgttacggttggtgatggtgccgttcttcatgggcaggtcggaaatgtccagatgaacaggctttccggtcaggcggtccaccatacggatgccgaacggggagagcgaatccttataggaggtttccccgatgaacaggcacagggcctgttcaataaaagtgtggaaactttcctctgaagggaaatcccctgcattgccgggtatcgccgcccagaagagggtcggcacgtccaccgtgttgtgacgcggtttcgcttccatcaacgccagttggctgcccacatcatttttgatacgcttcaacttttcccggtcatcgctccaggccatgacgttgcagtgtgcacggatggaggtcagccccttgctgtgtgcctcgttcaggtactcttcaatccattcgcggttaatctggttggaacggctgtaacgggaaagcgagtgcatgttccgtgcggtctgctcgaatttcctgagaatttcagccgaatcatcaatgaagagatactggttcaccacatggttgcaggtaagcaggatgcctatcggtgcggcaaaggacagccggcagtcgctccgatctgtcgagagcctttcataccggcagtcggttgacacgttcgacggcaggtcttccggatcggaaagcgtatgaaggcacaggtagttgtcgcccaccttcatttccccagcaccgagtgacagatcctgcaagcaggtagcatcttcctgcgacatggaaaaatacttctcgatgatgccggcggaatttttgctcccgatgatatcctcatccgtcaggcggatgatacgtagcaggccgctgtcgttcacgatgcgttcgaattgtccgcagcactccatgaaccgggtgacggtttccttgtcctgcatttccttggggataatgaatccccttgtaagtgcattgaaactgctggtcgtccggctgtgttccttcgtggtcttcgtcaggaacaggtaacaggtatgctgcaagtacggtcgctcgttgaaatgccgctcgaaactgcggctcagaaagctcaggtcttccttgcagatatccggcttgtatccctcttcaatgaagaagtcctgcttgtgtacgatgctgtagttcggcaaaacctttaccgcttttgcccaggtggagtgcatggactcgtactcggcacgtgtcagcgtgaacagttcgggcagttccacccggtatgccatggtgatgtccgcatccttgctgatgatgcagccgttctccacggccaacagcgggaacttgctttccagcgtggctgttttcattacgtttttcatgcttttctgtttttaatggttggagaaaacaaccggaggaactttctccggctgatgatgtagcggggatggctgcgcaacgcatggagtttcataaggccccattcaccgtatttcgagttcatcctgaaagtgacccagaccagcaccgatgcggaaacgaccccgaaaccgatgcagacccactggtcgatacctgccatatacatgacgacgaagattacgaacaacgcgagcaatcctcctgcaaagatgaacaggtactggctcttgagtcctttgaactccgggctgcgcccaatccccttgttgacattgaattccgccatattacaggaagaatgagcgtaagatggtggcggcgacaatcaggaagatacacgcaccgaaccagctggcggcagtctttgaggtgtccggatcgcctgatgagaacttggaatagaccttcacgcctccgataaggccgataacggcaccgatggcgtaaatcagcttggtgccgggatcgaaatacgaagtgaccatgttggtagcttccgtaattccaccgataccgttgccctgggcgaatgcccccattgaaaccagcagcgtcatggctgccaaaaagaatctgtttttcatgtgtcgaaacttttaattggtgagacaaaaaatgatttcgactgcgaatatataatgcttaattcattgatttacaaactgtacgatatgtaacaccatatgacatcacgttacatcggcaaggaattttcaaccattcaaaaagggttttaccggcaatatgaaacagtaaaaacaggataaggagaaagcggcatttcatttcttccggcaaaggtagccccgtgtcctgagaagcctggcaaggcggctctgcgggctggttgccgtgaaataatcatcctcgctgcgcttgcggtattttttcacggcaagccttgcgggattccggaccggtgcggaaaagccttcaggaaataaaataccgttcggtttgaatggatatatgtaaaacaaaaaacagaagataacatggaaacaagaaacaatcagacagtggctttcacaggacaccgtaaggaacgtattctgcaaggggttggaaacgatccccggatacttgcacaaatcagggaaactgtggctggaatggtaacagaactgtacgggcagggatacaaggaatactacaccgggatggccaacggctttgacatggcggctgcggaagcggtcttacaggtcaaggaggaatacggggatatcatgctcgtagcggcagtgccatttcggaaacagcctttatggtttgatgcggaagaccagctgttgtatacctgtctgttggaaagagtggaccgggtggtcatggtttccgagaactaccacaagggctgttacctgcgcagggatgaatacatggtacgtaaggcggatgttatcgttgcctattgggacctcgtaccgaaagggggaacattctacacggtgagcaaggcgttggaaagcggaaagccggtcatcaacctttatgaaaggatgaaatagcgactgtctgtattgggatggaaaagcgaagtgtgaaagccgccggctttcacacttcgctccttgtatattatattacctattcctcagaaccggaagagagggcacgctgtttccgtagttcctccttcttcgctttctgttgcttcttcttgacctccatttcagccataatctgctttaagggcttgaccgtttccggctcttcacgattgaaccgcttgaagtagatatcctcgataaactgcgaaagcggggttttccacacctcctgttgatggttatctaacttgccgagtttgtcggaattcagatccaattcacgagctatctatacttgcttgtccgaaagacgagggcgggtcaaaaggaatttttcctctttgagaattgaatattcggaaccagactccatcaggagtacgaataaaaagagggtgagtctgacttttggggttcatatcacttttgacccgccctcatccatttttccaatatcgcctttgttactgccatactcatttttttgcaaagatagtatgtctgcaatatatagatatacaactgtctggtatttattccaatggaatatttgacatgaaaaaagcacaccgatatcgcatcgatatgccttctgaaaatatgacaacaaaaagaaacaattaaacgaattcatctatatcgaatgcctctgtctgtttttctgtattatccattgccggagtatatgagtcatcacaaaacatactatcaataagatttcctattttctttttagcagcagcttctctctccataagtctggagacttcttcttcggataaacagatgcgtggggcacgaattgcaggatttctttttatggcaaaagattctgcttttggctgcggtactgcttgttgttttttgttttgcatattcgattccatatttacatgtatttattccaatcaattccaatctgctctaaagacggtttcgatgtctcttttccatttggcagcaaattctccctgatcagtctttccaattggctttgagtactcagttcagttgaaaagaacctgaacaggtctgtatcctgaagtcgatacagggtttcggctgcatttcggattttcttactgtcatccgtccccgaaataagcacatcagcgacattgtccagttcctcaaaagtcagtgcccttgaaaaatccgggtcaggaacacacccgtcatttgacataagttcctgtttttccgattctgtcagtcccttttgtgaagagaagccatctatcacatcatccggatctatatcctcatcttcctctataggctctttcttcataggttcagaacgtgtgggagtttttcttgccacatccgggtcttcaagatagactattttcgtttttccgattacttcattgtactcgtccagtggattcggctgcgtttcggttttctcttcatgcccgactttaaggatatctttctccgcttgtgcgatccaggcttcagccttgtccagtcttgccctataccgggctttccttgctttttccgccatccgttttttacgtaatttccataaccggatacgtgcaatacgcatatgacgaagctgactatcccaaaaattataaactctcggactgaaaatgaacatccataccttatataatatgtaagttgccgacacggcttttactgaaaaataaattaatgttgtttccatgactattgaattttagggggtgaaaaacggtctttatacattcgggtgatttcctcgatgttgagttctatatgctcggcgatgatgttactgatatagctcgcaatacttacttcgggagctatcacatggagataattctttatctcgtcgtacagcttgcggttcaggtacacctggatgcgtccgggcatgggggtattcaccagatacttctgacgaaagttactgtcacattcgggcatattgcaaggtttggaacttttccgggcagtttctttttccgtatcctgcctttcattgttttcctcttccggaacctcaaccactatgatatcgtcgttctcgatggcatcaggaatgtcaccgaccatataccccctgattttttcttcattcacttttacaattttctttgccatatctcaattacaggttaaattttacaatcagttcgtttgccagttcctgcaatccgctgcctttaagctgtcctgccggtggtggaaggagcgagcagcggaaataggtacgtgtccgggatgacagttccttgtcatagcgacagagatcgggaatcattgaatccagaattttcaacccctgtttcttcatcagtgccatataattgtcaagcacttcggtattgcttcttttctttaccttggtccagaacaggaacacgtctttcaagggaatgttcttccggttttccgcacacttcataacacttttggcaaagataaaactgctgtccataacgaaattgtcagcggcaatgggggtcaatacataatccacattgaaaatggtctgcaaaacgccggatatgtccatagaccccggcaaatctatgaaaacgatatcaaaatctgcttttgccgccaactctccggccacctggcgtgcattctccggctttgcctgcctgataggataaatcctgcatcccctgagcctctgttcctccagcaacaccatgtactttttgtttatctccaccatctccatgtcccgttccctcagattgaacaggctgcgctgggtggcgtcacaatcaacgatagccacattcttgcccatcgaataattcaggagactggcaagtgttaccaacattgtacttttgccgaccccacctttctggttgctgactgcaacgaataacggattcttcttcataactgaacttttttaatggtttgttatactattgttttacttgtctgttgtttgctttgtgacaaggtttgttagtgatacggttgctttgtgctcaccaaccggcaaaccgaccaaccgatagttatctgccctaacaaagcaagtaaacaatcactgcccgcctgttgcaacaagtgttttcgctaacgggtaatacaacggacagccacttgattattggtttgttttaccgttcacgctgcaaataaaagggtattttttcatacctgcactatgttttaagggaggtgacgacctgtgtcatcatttgtcatcacgttacatataacccgctattttacaacaggataaaccgccataactttgcaccgacaacggaacggataccgctgcggaggtttcccgaagccgaagaatgaggctaaaggtcaaaacttaatttgacgaaggaaaattcatgttcaagcgaacatagcaagttgtgttttgggcagcccgaaatgattcgggcatcccaaaacaaacttgccactcgcctgaaggctcgggagggatttcctccaaagtcggaaatccatgacggaagatcagtaacagaaaaacccaatgcgtatggaagaaaacagaaaaagaagaaaaacaggaagtacgggcagaaagccgaaaactgacccggcagtttaccgttacggtatcaaactgacctcggaagagaacggaaattttgagctgctgtttgaaaaatccggaatgaaacagcgggcaagattcatcaaggcgatgattttcggacgagaaatgaaggtcgtcagaatcgacaaggctgcggtggattactacatcagactgacaaatttctatcaccagttccaggctatcggtaacaactacaaccagacggtaaaagctgtcaagtccaatttcggtgaaaaacggacattcgccttgctccgtaatctggagaaggccaccatcgatctggtggtgctgagcaaaaggattatcatgcttacccgggagtttgaggaggaatacctgataaaaaggaataaggaggaacagcagaatggtggctaaaatcaacagaggtgtatcgctttacggagcggtcatctacaaccagcggaaagtggacgagtccaccgcccgtatcatcacgggcaaccgtatgattaccaatatcaccggaaatccccataatgtcatgcagcagacactatgggctttcgacagctaccttgccgccaacaggaacacggagaagccggtactgcatatctccctgaacccatcggtggacgaccgcctcacggacgggcagttcgcggaactggcacgcgagtacatgcagaagatggggtacggcgaccagccctacatcgtctatctgcacgaggacatcgaccgcaggcatgtccatatcgtctccacctgtgtaaaggagaacggcgaaaaaatcagtgacgcatacgaatggaaccgttcgatgaaagcctgccgggaactggaaaggaagttcggactgaagcaggtggagaacaaacggaaggaattgcttgaaccatacctgaaaaaagcggactaccaaagcggtgatgtaaagaagcaggtgtccaacatcgtaaagagcgtgttcggctcttaccgtttccagtctttcggggagtacagcgcattgctctcctgcttcaatatcgaaacgaagcaagtgaaaggcgaatttgatggagtgacttataatggtatcgtctataccatgacggatgacacaggcaaaccgctttgcacacccatcaagtcttcccttatcgggaaacgctacgggtatgagggactggaaaagcgtatcggttacaacattcgtgagtataaggcaaaaaaatggcagccgaagattcggaacgaagtggcacttgccatgcacggttgccgtggcgaccgggagacatttgtccgtctgcttactgggaaaggcatagatacggtattccgtgagaacgatgaaggacgcatctacggtgcgaccttcattgaccacatgaaccgggaggtctataacggctcccgtctcggcaaggaattctcggcaaacgcctttgagcggctcttcaataatccggacagcatcccggatttggatgcgcacatgccggacaccggtctgcaaagcggattctcctccgatatggaaagtgccatcgaacaggctttcgggatattcaacctggaagcgaacggtcccgatccacaggaagaggctctcgcccggaggctgcaacgtaaaaagaagaagaaacgccgctcacggggaatatcctaattaccgaatttaccaacattaaaaatcagtttatcatgcaacaggaagatgatttgagaggactggccaaggtcatggagttcatgcgtgccatatccattgtttttattgtcattcacgtctattggttctgttaccgatcatttgtggatatgggtatcaatataggcgtggttgacaggatactgcttaatttccagcggacggcggggctgttctgcaacctgcttgtaacgaaagtgtttgccgtcatattccttgcactctcgtgtctgggtacaaaaggtgtgaagaatgaaaagatgacatggaacaggatatatgccgctttcctttcggggatggtgctgtttttcatgaactggtggatgctcgacctgccgttcaccccgacagccaatgccgtcatatatacggtaacgcttaccgcaggatatatccttctcttgatgtcgggtatgtggataagccgtatgttgaagaataatctgatggaggacgtgttcaataccgccaatgagagcttcatgcaggaaacaaggctcatggagaacaagtattccgtcaacctgcccacgaaatttgtctatcagggcaaggaatgggacggatggataaacatcgtcaacccgttccgtgcttccatcgtgcttggaacgcccggttcgggtaagagttacgcagtggtgaataattttatcaaacagcagatttccaaaggtttcgctttgtatctgtatgattacaaatttgacgacctttccgtaatagcctataacgaactgctgaagaacctggataaatacaaggtcagaccggaattctatgtgataaactttgacgatccgagacgcagccaccgatgcaatcccataaacccgaaattcatggccgatatcagtgatgcctacgaatcagcctataccattctcctgaatttgaacaagacatggatacagaaacaaggtgacttcttcgtggaatctccgattattttgcttgcggcgattatctggtacttgcggattttcaaggacggcaagtattgtacctttccccatgcgatagaattcttaaacaaaccgtatgctgatattttcacgattttgacctcgtatccctcactggaaaactacctttccccctttatggatgcctggcaaggaggagctcaagatcagctccagggccagatagcgagtgcaaaaatcccgctatcgaggatgatttcgccacagctttactgggtcatgacaggcgatgacttcacgttggatttgaataatcctgaacatcctaaaatcctatgcgtgggaaataatccggacagacaaaatatctattcggccgcattggggctatacaactcccgtatcgtgaaactggtaaacaagaaaggacagctcaagagttccattatcattgacgagctaccgaccatctatttccgtggtatcgacaacctgatagccacagcacgaagcaacaaagtggcggtgtgtctcggctttcaggatttctcacagcttacccgtgactacggtgaaaaagaggcgaaggtaatccaaaatacggtcggaaatatattctcaggacaggtggtcggggaaacggcaaaaagcctgtcggaacgttttggcaaaatactccagcaacgacaatccatctctattaaccggcaggacacatccacttccattaacacgcagttggattcgctgatacctgcatccaagattgccaacctctcgcagggcacattcgtgggcagtgtggcggacaacttcggggaagaaattgaccagaagattttccacgcacggattattgtcgatagcgaaaaggtagcggcggaaacaaaggcttacaagaagatacctgtcatcaatgagttcaaggacgagaatggcaacgatatcatgcagcaacagatagaccggaactattcccaaatcaaggcggatgtggtgcagataatcgaggatgagatgaaacgaatcgcaaacgacgagaacctgaaacatttgttacaggagaaataaccggtgggtgacaaaaatacgggcggggcaaatctgatacattgtcccgcccgtcattcttttaatcctgattttcagaaatttcctctttaagtaatttgtttatggtcgttattgtgtgggtctgaaagtaattttttagttcggcatcatctttcagcagtatgccacattcttcatcaaaagttccaatgatatatttttttaattcagagaaactttctgcaaacggtatctgtctgttttcttgccagtatccggtcgtgacttcggagacaaacgctttcaatacggctttttcctccttgtccagtttcttgaaaggcattgtttcccggctcacgtgcaatggctcccgtaaaatatcctccggatttttaccgttacgtatagcggacatacaacttttacagatatgttgtgcgtgtcctttgcctgagaacttctcgttcgccttatagttgccacagatacggcaatagtgcccctgttgtttcttcttctttttcgccatgcctattgttgttttaataattccagacctttttccgtcagacggtatttctgcttcgggtggctcggctgttccgggtacaatggaacgatatatccttcattcaatgcgggatgcaagtagttcgtcctgaatgtgggacggtggttcagttccaatgcttccattatttcttttacggacaattctccttcatccagtatttttaccaaagcaagaacctgatcggtacttggtcggtacttggtcggtgcttggtcggtacttggtcggtttgtcacatcgcatctgaatatcagtgttacactgtctgcccatatcttatattccggttcgggcaatcctgctttgcggcattcagacatcatcagtcctataccgcgtccccagctttccaaaaccttccgtttatacagaacattggccaataaaggattttgtggttttgattcatgctctgacttcattttttctgcatcccattcgggcgggaaagtaccggggttttctatttccacacgatcatcataaatggctatgcccaccgaaccgccggcttctttgtacgatctgtgggtcagcgagttcaatactccttctcttatagccttgtagggaatggtcagatgttcctcacgttccaatgtatcggttgtgccggataaggaaaggtgcttgaaaataaatgccattgccgcattgagcagttgaaaaaagttgccttgaatgcgttggctgtccatgaatacggttttgtccgttcctttgaaacgggctaagcggagcaggcattggggatattccatatcctcatgttttccaaacagcacggctgccgcattgttcaacaccccatctttcagtaaaccgaactttcctaatatggcaggaatgtcagtaccggtatcttccggcaggcgaccgcattctatacctaatctgactgtcttcaatacctcgttggtatccaagtgctgtaaggtcaggttgctgtttgctaaaagttcccagcggtatctgtttccgtcacgctgcaacagtagctcattgtatgccggctgcggcatcgtggtggtcgcactttccacacgcatatagggtcgtcctttatagcagaacggacggctgggtttggaatcttcaacacggaaaacaattacttttttctcattatccgacagcggtacataggagatctgtaccattgccacaggttccagccgattgattgcttccgctatatcccgtttggtcttgtcgcttacttcctgcccgatgatttttcccttgtcgctcacaccgaacagcaccgtaccaccgttaccgttgagaaaggcgcaaagggtttccataccgcgttccaactgaccggtggtttccttgaactccaccagcccgccttctttttcagctatcaaccgttttattatatcgaggtcttctataatcatatataattctgtaacgtaagtacaaaggtagcggtttccgctgacattcgagcaaaagaatcgaatactatctgtcggaaaagacaaactatcctataaaaatgcaagaatggcatcctgccaccatctgcttcggctttggtacaagatagccttcttatgcgctcttgatttacggctcctgatgcccaaagaagacagtaacaaggaggataagacatccgcttttttatttcagcctgcaaaggtagccccgtgcctatctggattgagcaaggccgggcccttacgggtttccgcaaaaatcttccgcgctgcgcttgcggtatttttccggaaagccttgcacaatccggcacgggactgtttggcaggcaagaaataaaaaatcggctcacgaaccggtaagtgtttaactgaaaaaatatggctatgagcaaaacaagagcaaacaatggcatgaaagagaatttgagtccaaccaccgaaagcaaggataatctgctcattggacagatttattggaaagggtgtgcttaccctgtaagagaaatagataccggaaaacatttgttcaaggtgtctgtggaaagcctgctggatgaactgataaacgatatgcgcaacggaatatatgaggcaatggaagcgtgcgaagagatagacgcttactgcaccgatgaagaactgcgtactttgtccgattctgaattatataaactgtattgttaaaccaactgattgaaaaaatatgaaaaagagaagcaacttcacaccgatggaaagatttcatgagattcttgtcggtcatagtttgaatgcaatgaatgtgggaatcaaccatattcgtgttttccttgagggcaaaaaactgtttgattactatccgttaaggatgaaactgtttgactaccataactggcaccagttgacttatccttcttttggaaacgacgacacgaaatgggaaaacgaacttgatgatattatccggtgcctgatgataaaatcccaataaaagttatgcttataaacaaaaacagtaaaacgctcatttgggataacattcccgaatgggcgatttattcattggagtatggcattgaagaggatttgtttcttaccgatgaagacaaaaaattgataaccaaatttatcggtgaaaattttccaaacggatatgccatgtcagtggattgggaatcatacaaggagttcgaccgttttcctgcattcggaaaaccgtgcaagacttatacggtcaggttctgtaacctataaatcagaaaaatatgagaaagataacattgagcgaatacaatgccattccggaaaactatcgtgggatttggactgtcgaacgttgggatttgcctgattgggcagaaatacgcaaaagacatatcggcaaacgtaccatgatggtttatgataaaggtacatgcctgctggtagagggaatcggctttgaaatcgtggatgattccggctggaaaaagccggatgaaatcagaaaagacatagatatgctttaccaagagttctgtaacatgcgtaaatgcgaaccgcattatgcagattgcatcatacgttggcaggacactctggatacattggaaacaagaattgcattgtccatggattccgatacggaatgggatgaagaaatcttctattattgcaacagccggaacgaattgaaatcactcacagaaaaaggttgctcagattttgtcattgctgattgcttcggcttcggaatgtatgaaaagccgatgcaggaaatctgaacatattgaaaaaagtaatgaaataccaataaaaacaagaaatctcagccataatgaccgagatttcttttcttcctttttatagtgcagatgcgacgactaagctcgcacgggcacttttagtattgcaaaggtaaggattcttttttattcaaccaaataatatgaattcaactttctattttggaaacctgcgctataactttttgggcttcgggagtctgaatggaactgacaagattttgaatatcattctccaaatcctttttccgcgattgtgagatacaccccagcatatacctgacaacatctatgccacctttaatattgtgtctgcattcggcagaaatgtcagcaggcaaacgtttgattcctttaggaaagtccatacggtaaatacaacctccgtgtgcacatttgttacgaagtacacgtatagtttccatatagttataaaaaacacctcttgaacagccataggcattagcgaccagatctttcgcttccgcttctttcagcgaatcatataatgttatgatattgcctattgtcataaactcgatggttttccatgcaggagcatatatccccggatggttggcatgatgacgttggataatggggtttttacgcataaccgcatatacctgttcttcaaaatcgttaacgaatttagaggttacatacttacgattgacaaaccagcaggggtcatcaatgtatttcagcgatatgttgtagatgagttttgtacggatattgacctcaatacggtcaagagcattgagcaacaatctcctgagtctggtatcaaactcataaaggtcatagacacttttaaatgtagtacccggttttaactgatggtcacgatgttccagacatgggaactttatttcgtatggaaaagaatagaatccaagtcggtaataacccacatcaaggagaatctctttcgctttctcctcatcatcaaatgtcattccatttgatttcagtctggctatttgttggtctatcgtatatgcctttttcattgaattcattgaatatttattttaaatgcgaatttactcatttttcttaaaacatatatccaatgtgctgattgatttatagaaagataaatcgtgccaagcattattccatattcctccataaaattccatcattattccgcttcacttggcaagtcccttcgagaagataactcggaggatgataccttccacgttcaagcctccggttttcgggacacaaaattccctttggtaattttccgcccgaaaaaacgctccggtatcatcgtccgagttggggaaaaggtccgggacttagcaagcgaagcgacctacgacgcataggacaaaaccaaaaagacaaatgacggcggtcttttgccgttgctgatgtcgcaatggattacgctgtcaatatctaccatacaaaaatgatcttccggtcttatggagcaacggaaggaagtggggactaaagacagctcgctctccactctgcataatacatttctctttatcgctttccttttgtttccggcttttctaccgcttccgccttttctgtttgttggggcttacctcctgtgtgttccttctttcttttttgttttatcggactcagtatatttcccgcacttttaccctgattcttccgtttttctgcctttcgtcttcccgcctatggtgaaacgtgatgacatacgatgaaacgaatagtccaacgcattgaaatataatgttttatcaaaattatgcctatatatttgcggtgacaacaatagttttcaactctaaaaatcacagttatggcaaagaaaaatgtaagggacgaacccatgaaaacacaagtcaccgagaatgatcagctgagtgacattgtcttcattctcgacaagatggaactgctgttgcaggctatatctgaaatcgacaagaacggcaggtacaagacggttccggcagacagggaacaccggaactcctttctgaaaatagaccgttatgccagcatgttcgagaattttctgaaaaacttctggagccagttcaaggacccgacccgtttcggactgctcaccatcaaggaggacaccctggacagccctgaagtcagacaggcggtggaagacatagccgcaggcaggaaatcggatgcggtggatgaatttctgaaaaaatacgagattgtaccacgcaccaaggaaaaccaaagtataaacaatcaaaatcaagaagaaatggcaaagaaaaaccagacacagcagcaggccgccccggaaaccgggcagcagcccaagtaccgctacaatgaatcaatgatcaactgggaggaactgaaacacttcggactgtccagggaggaacttcaggagcgcggactccttgaccagatgctcaagggatacaagaccaaccaggtcgtacccatcagcatgaatttcggttccgctgttttgcgcacggatgcacgactgtcattccagcagtccgtgggaggtcccatcgtattgggcatccacggtatccgtcagaaacccgaacttgaccgtccttatttcggacacatcttttccgaagaggacaagaagaacctgcttgaaacaggcaacatggggcgtgtcgtggaactgaagggacgtaacggggaatacatcccttccttcgtgagcatagacaaacttaccaacgaggtggttgccatgcgtgtggaaaatgcgttcatcccgaaggaaatcaagggggtaaagctgaccgaacaggaacagaacgacctgagggaaggcaagaagatattcgttgaagggatgatttccaacggtggaaaggaatttgatgcccatatccagatcaatgccgagcgcaggggtatcgaatacatcttcgagaatgacaagctgttcaaccgccagtcgctgggtggcgtggaactgaccaaacagcagattgaagacctcaatcttggaaaagccatcttcgtggagggaatggcacgcaaggacggtgagatattctcctcgtatgtaaagctggatgaagccaccggcagaccttcctatacacgctacaacccggattctccggaaggcgcacgtgaaatctacatcccgaaagaaatcaacggagtgaagataactccggaagaacagcagcagctccgggagggcaaggtcatcttccttaatgacatggtcaaccgcaagggcgaggaattctcctcattcatcaaggcagacctggaaaccggacggctcagctattcacgtacaccggacggcttcgagcagcgtgcggagttcaagattccggacaaggtatgggacgtgcaactgaaccgccagcagcgtgccgacctccagagcggcaagaccgtgctggtagagggcatcaagggctatgacggaaagaccatctcacagtatgtcaaggcgaacttcaaccagggcaggctggacttctacaacgagaatccggaccgcaagcgtgacgcttcacagcggaatgtcgtggccaacgcccagaaacagggacaggaggcgaagcagagcagccgcagatccaaaggtgcaagcatggcctgaagtaaaacgaatgtataatccaaaagaatcagaaacatggaaaagaacaatggaaacaatgcgcctttcaaggcggaagacgtaaactgggaagaactggccggaatcggcatcctcaaggacgaactggaaatgtcgggagaacttgaaacgctgctcagcgggaagaaaacgaaagtaatgtcactcagccttgtactcctcggtgtggacgtggtgatggatgccaccctgcaactgatacgcaaggacggtgaaccgctgatggaaatccttggcgtgaagccggtggcatagcatccgcttttcacccgatacgacaatcaaccgtcaaatgtcaaaccgccgttccccgtcatccatggcggtcgcggggaacggctttaattttacaaaaaaatgaagataaaagcaatcatagcagaaaaaccgagtgtgggaatggatatcgcccgtgtggtcggggctaccgaaaagatggacggctactgtacaggcaacggatacatggtgacatgggctctggggcacctcgtgcaacttgccctgcccggcacgtatggctatacgaagacaaccgccgctgatctcccgatgctgccggacccgttccggcttgtttccagactgatccgcacggacaggggcacggtgacagacctgaccgcttcccggcagttgaaaatcatcgagggggtattctccagatgcgagagcatcattgtggcaaccgatgccggacgagagggtgaactgatattccgttggatatatgactatctgggatgcaccaagccgttcatgcgtctgtggatttcatcgctgacagacgaggctatccgggaaggtatggccaatctcaggaacggcagcgactatgacagtctccatgcggccgctgactgccgggcaaaggctgactggctggtgggcatgaacgccagccgagcgttggcgatagccacaagttcggccaacaattccatcggacgggtgcagactccgacactcgccatgatatgtacccgtttcaaggagaaccggaatttcgtgtctgttccttattggcaactgcatatcacgctgacacagggagaggcgcaccggcaattcatccatacggaggaattcaaggacaaggcagctgcggaagcggcattcggcaacatcggcaccggttctcaggcgacagtcacacgactggaacgcaagagggtcttccggcagccaccgcttctttacgacctgacatccctgcagaaagactgcaacacccattatgacctgacggcagaaaagaccctttccatagcccagtccttgtatgagaagaaactcatttcctatccgagaaccggcagccgccatattccggaagatgtcatgcggatcattccttccctgctggaaaaaatcacatccataccggatttcaaggcatacggggaatcctttgacttgtccgacctgaatacccggtgtgtggacggcaccaaagtgacggaccatcatgcactgatcattaccggtatcatcccgaacgaactctccgaggctgaatcggcggtctataccctgatagccggcaggatgctggaatccttttcgccaccctgcgagaaagagcagctgaccatggaatgcacctgtgagggaatggtcttccgttcacgttcctcttccgtcatccgtccgggatggtgcggcgttttctcacggagggaggaaagagacggagacgaaccggaagggaaagtcggtatggctgtatttgccgaaagggaaacccttcccgtcatgggtcggggactggtgcagaagaagaccctgcccaagccgctctacacggaagcgaccctgctgggcgccatggagacttgcggaaaggacattaccgatgaagaggcgaaagaggccgtaaaggatgccggaatcggtacacctgccacacgggcagccatcattgccaccctgttcaaaagggactatatagaacgatccggaaagagtatccgtcctacggaaaaagggctctatctgttcgaggccgtaaaggatatgcaggtggcggatgtggaaatgacaggctgctgggagaaggcactggctcagattgaagggcatacactcgatacggaaacgttcatgcgttccatccgtaactacacgcacaaggccaccggtgaaatactccgtctcgaatttcctctgcccaagtcacgttccttcacttgccccaaatgcaagtgtggtcatgtcatcatccgggggaaggcggccaaatgtgacaaggaaggttgcggactgatggtattccgccggtttctgaacaaggaactgaccgaccagcatctggaacagcttttctcttcaggctccacccggctcatcaagggctttaaagggaaaaaggggatctcattcgatgccatggtcgcctttgacgagagctttaacctgaaacttgtttttccaaagcccaaaggtggaaaagggaactgaaccagtcattccatttccgggacaaaggtagcggaccgccggtttccacctgcaaggtcgggccttgcaggtttcggggaaaatcatcctcgccgggctccggtattttccccgaaaaccttgcctgtggaggcagtccgctttccggccccgaaataggaaatgacatgtttcaccgattaacactgtacggtcatgaaaacaagagagtttatcgcgaggttgagaacagacaaacggatcaggatggcggcattggtgcttgttgcctttgccgtattcagttatctgtattcacggggaatatcccccgtatgggcagcggtagccattgtctgcttcaggggattcttcaggtttctgtataagatagtctgcctgcttgttgccgctgccatacttttctgcatcctcagttatctggtcttttagcaaacagaagggaacatgaaccggatatgctttacctattatatggattccgacagaaacagcgtacggaacggagctgccttgaggggcggctctttttgtatctgccatgtccgtcatttagggaaagtagaaacagcaggaacaggaaggatgaaaatacagccattgacagaccgaagaactacagggcaaaggtggcaaatgcttctgtacggacgacaaggtcaggccccttgcgaggtttcccgggaaaaatcatcctcgctctgctgcggtatttttcccgaaaaccttgtctttccggaagcatttgcagtaaaggcccttgtagttcaacgggctgccaaagcccggatattctcaatttaaataaaaggagtatgcaacagacaatcatcgcaagacagtcaccggctccggcatggattccggtgatagagaaaaagaaaaaaatccggataccggaaccgcacatcaagctgcccggcaggggagcgacaggtcccgtacctgtttccacgctgttgaatccggtattggaaatctgcaaccatcccgacaggaacaggcttttggctgaatttttccaggaatattgaaacaaatcgttttaccattaaataatttaagttatgtttttcacagcaatccaccagatgatgacagaaaacgtggatctcacaattgtcatccgcaaagcgaacggacaactgaccgttgccacattacccaagtcaaacgggctcaaggacgaggctcagaaccatattgttccgctgaccgttacaggcacaccgcaggaacttgacgcgggattccttcagaccgtcacacggccgatacagaaggccggcggcctgattgcgaacatggcccagttcgaggcacaggcagacaaggcggcagccaacagcaaggccgccagggaagcgaagtccaaggagtcaaaggaagagagggaaaaacgggaaaaatacgagaagctgatgaagaaggcggaagaaatgaccaccgccaagaattatcgggaagccctcaacctgctcggacaggcaaaatcccatgcgaatgaagcacagctgaaagggattgaagaaaagattcaggctgtcgacaaggaaatgaacaagggaagcctctttgacctgatggaacggcagccccaaccggaacagcagccggtagtacagaaccgtacacaaccgcaaccgcagcaggtcatgcagccacaagcggcttatgcccctgctcggcaagctccagcaagcaggcaaccgcaaaggcaggctcctatgcaacagccggaaagaccggaattcggacagcctcctgtactgcaggcacaacaacagtcagggttgtggatgccacagcaaccggaacagcagccggtacgccagccactgcaaccgcatcctcactatgcttcacaaaacaccggatccggacaggatatgtatggaatgcctccggcaacgggaggatggcaggatgaatccttcctgcaggaggatgaacagcagcagctttacttctccgattctgaacaaccggcctacaatccgaaagactacgaggattacatagactttccgcaatccatgctggaaccgaaatattcaccttatcaaacccgataaactatggctcttcaaatcaaagggatgtcacgtacattcaaattcaagaaaggaacagagtatgtaacccttcaagacccggatccgaacctttctccggatgtggtcatgagttattattcgaacttctatccggaactgaccacggcaaccgtacatggtcccgtcatccgggatgacaggacggaatacgagttcaagacaaccatcgggacaaaaggctgacggtatggataaagacaacaacaagaaacagaagaaatcatgtgtaccattggacggacagcaggcggaacggctggcaaggctcatcatcggacagaccgtgcgcaatatccggtatggaacggacaggaaagaaaggataacggtgccaagcagtgccgttcctcttttctgaacaccacgtttctgcccagaccgctgccgaatctcttcgtggaagacaccggaggaaacaggtacaatctcatcacgcaggaaaattacgaattcctgcgtgattcttatttcaggtatgcctgcctcttgggaaaggaagcggtacatactccgggacgtacattcggcgaaggaatcgcaaaactgcacgaagaaatggaaatccttgtcggagaagaactgaatgtcaatatagaagagcaaaacggacggttgctgttcaggctctggaaaacccatcgttggggtgtactgacattgtattatttcccggtgaaattcgtggaagatctcggtccggaactgagacgcatctccatcacgtttatccatcaactgatgaaggcaaacggaatacagaccgtgctggacgaggacgatacggactatgtgctgacttggatctcggaaggaattccggacgagacagcggaggaaagaagaaaccatctgaaacttctgcactcctacgagaacggcagaatacaagcactgctccgtagggtggaagacaggtgttactacaagaaccttccgaaagcacttgaccggtatgagccccaaaatgactatgagcggtcgctggtctccgccatgaaggaggggttggacttcctgtcaccggagcatggtatcatgcaatacagttacgaccctttctatgaagaggagcctgaatgtctgccgatgtatctctggcagcagattcgtgtagtctatgacagtaacgatatggtgacagactacctggtggattactacaattcatacagcagggagacctatgacatcatacctgcaacgacactcgccctgtcaccggaaacggaaaagttattctatatggatgactatccggagcgatttctacaatgggcggacaaattcatcaacataatcatttgaacatcatgatagagacaaacgaacttacaaggactttgaagaccttgcttatccccaaggcggcactgattgcttacgcctcggagaatgagaggaatttctttctagaagtacgggatatagacgaccggggaaatatgacggaaggaaggccggtgaccctggaattcatgaacgaactggtgaaggggtattcggaaaggcacagtagcacgccctacggaaaaataccgtccaacctgatgtattgcgattcacgaaaaggaagcgaacggtatgtatggtacaatcctccgggtaaaaggatgatgttcttcattccggggcttgaaatcgagaatgcggaatacaacctgccgggagtgatttacaaggcgggggaacacgggatgaatatatatgcctacaagggcgatacacccgatgaggatacgccactatatgccgcaccgttcttcaacgtgaccggatccagcgtatgcctgggttctgccaatttagagaaaccgaaagatatgagctacgaaaagctgctgcaatactgggaaaagaaattctggctgacggagttctcccacttgggaggcaacggaaacccgactcgatcaaaccttgtattggtgacgaaagcagccaggaacagacctttcgacctcgaagagttaaaaccattgaacaatctgaaacttaaagacatcctgaaatgaaaagagtacactatattgacaactatctggtaaatccgcagcatccggtaacggtaaatctgattggtgcgggaggaacaggctcacaggtactaacctgtctggcccggcttgatgcggcattgagaggactcggacatccgggactgttcgtgaccctgtatgaccccgacatcgtgacggaagccaacatcggccgtcaactgttcgggccgtctgatctgggacagaacaaggcgcaatgccttgtcacccggataaataatttcttcggcaacgactggaaggcgcagccggacatctatccgaccgtattgaaggatgcccgacgggataatctggccaatatcacaatcacttgtacggacaacatcaaatcccggatagacctgtggaacctgttgaaggctttgccacaaccgacatactgcacttacgaaacccctttgtattggatggatttcggaaacacgcagaccacgggacaggtcgttatgggtacggtgccgaaaaaaataaaacagccggcatccaaactgtatgaaactgtcagttccctgaaagtaatcacacgtttcgtgcggtactctcgggtaaaggaagaagactccggtccaagctgctcgctggcggaagcattggacaggcaggacctgttcatcaattccacgctggcacaactcggctgcaatatcctgtggaagatgttccgcaacgggatgattgagcatcacgggctgtacctgaatctggaaacgatgaaagtgaatccgataaatatatgaatagatagtcaaccgcatttatatatgtacttgttcttcatacgccctcatccgctccaataaaatttctttcaaattatcgtttttatctaggttgagcttacttcttatgcttgagcgctgacttgtaatgttgccgctacttctatgcagtatttcacatatctgactgactgtcttatcctgcacaatcagccggcagatgctcaactcagatggggatagctcgggaaatatactccgaagcatctctatatggctcttttcttccttcatgtgtgaagtgatggcggcatagaggttcttttttgtcttttcccccagtatgcttagcagcgaaccgttcttttcttctgtattgtcattgtttgcgagctcggcaaatgcaaacagttcttttctgctcatctgaagcgattttaagagggaggcctcttctgccttcagggtattgtattccttctgaagggaattgatgtttttatttaacagccgtcccagtattgctaccatactatatataatgattatcaaagggagaaaagaggtcaaaaaaggtccatgcgtgacaacaacacaggctatatatgaagcaacagctaatatggataacaggatggatactttatacatatatgcgcagatagcaatcatgatatataatattgacattaccatattactcataatgagtaatcgttgaaaagagtaatcattatgtatagaacaatagattatttctatacatttttctatatgtataacgattaagatggaagaaaacgctgtattgatattgattttctttgtggagtaaagtgtagtaaacaccaccaatgccgcaaacttaatcgcattcatataatagtacagtgttcccgggaatggtatactgaaggtgtaagttggaatacagagaaatacaatgcctaagaaaagaaggaatacgttcttttgctgatgttccattatagtaccttcttctatcgaattatcaataagctgtcgatatacggttcctactgtcataattaatcgattttcagttgttaatgtatatgtttgtttttattaggtgcaaatataattagttttttattgaaaaccaaatatttatctataatatgtaatcattataagtattcgaggtttaatcggataattagggtaagtatgcaacataaagtatataaagtgccataagaatcatgaaattgataagataagcattataattatatactactattattataagtataaataagtagatataaccagtaaatcaagtattatgccataaaactttaagtgtaaacaagtataaaatagttgtttggctctttgttgggaagaaaaatcggagttaattttacactcgaaatagataacgaatgtataatatattagtatgaacagaaatttgacaaccttattatgtggcttgattgttgcactctattctatatatggtgcgaacatgttacatgcgcaggtccagaaagattctgtccgaattttcttttatcaagggagagctgatcttgatatgaaattaagaagcaacaaattggagttggagcgtctgttggaattgtgttcgtcaattgaggatactactttgtattataataatatatctatcaaagggtggacttctccggaagggggcatatcaataaatagcagtctttcgaaaaaacgagcagatgcgattattgaatttctttcaaccaatgtgcagaaaaaaataagcacaattgacgtgcattttaaaggaagtgactggaatcgacttctggatttggttagaagggataaaggcattccatttcaagcagaagcaattaacattgtggaacagttgatgattttggatgaagcggagaagtataaatactttgatgaaattagaactctacatagtggtaggatctatgcttatctatatcaaaaagtttttcctgaactacgttccactattattcagtttgcaaaagaaagaaaaccttgtgcatccgttttcatgcccgatacggtttatatccatgttacggatacagtctatatacctgtcaaagaaatagaatgcgataccatttacgttccggtaattggcaataagaaaccgttctacatggctataaaaaccaatttgacatacgatgcattgttgattccgaatatcggaattgaattctatcttggtaaaaaatggtcagccagtttgaattggatgtatgcttggtggaaaagtgatcgtaagcataactattggcgtacctatggcggtgattttgagataagacgttggctgggcaaaaagtctgacataaaacctctaagcggacatcatttaggtgtatacgctcagatgttaacttatgatttcgaattgggtggccgtggttatctgggtgataaatggacctatggatgtggtgtaagttatggttactctcttccactgacctcacgcctaaatatggatttcacattgggtctaggctatttaggtggcatttacaaagaatatcttcctattgatgatcactatgtatggcagaaaactcgcaggatgaattggttcggtccgacaaaagcagaaatatctctagtttggttgattggaagaggcaacaaaaatgcacagaaaggaggtataagatgagaatgggtatcatttcgatattgttttgctcttgtctcttgtctcttgtctcttgtgagcataaagacttgtgttatagtcatccacatgaccaagaggtaagaatcctttttgattggagcaatattcgcgaggagaatattccgaaagtggttgctgtcgtctttcgtaatgaagaaacaaatactgtcgtagaatttgccttgccaccggaaggtggtatagtaatgattcctaatggagcgtatgagtttacagcctataatgtgggtcaatatggaaacatctttaaggagacagatgcaggcaaaatagtaacgactcctgtttctcgcaaattgaaaggaatatattatgaggctcctgattttttgtgcttggagaacctaagggttgcgcttacagattccgaaacgtccaggttgataacggcaaaacccatcagacgaacagcaagggtggactataggataaatggcattgaaaggttggaaaaagcagatgctatctatgctgtactgtcgggatgttcagccgaattggaactctataccggatgttgtgtggaaaggcatgaagatggaatacagcataatatagtatttgaagtagataaatggaagcagcaaggatggttctatatgtttggaggcggattcacccctgaaaatagaagaacgagcgaacatgtccacattctgtctatatacgcagtgtataaggataataaatacaaaaagttagatattgatgtgacacaacagatacattgcgagaatccgataggtttacccatggaggattttagtattgtagttgatttaaatttggcacatcccgatggtggtgatgacaccgatgacactgaaggttttttcgatccggaagttgaaggttgggaagacattgaaatagatattccattgtagaataataattttttaattaaacaataagaaacgcaaaattatgaaaaaaaagagcttttacattcttgcattggctgcattggcagtaagttgtactaacgatgagttgacgaccaacgaaactaacgccgttgtaggttttcacgcactgacatcgggagtaaccaccagagctgtcaacgaaaccaatagtgttaaccttaaagacagtccgtttgatgtctatgctttcacagagactgatggcaaactgttcataggaaaaagcctgagcgaatccgattacgaattaagccagggtgttgaaatccgacacaatggttctgcgtgggattatgctaacccggcagacaaggcatactggcctacggacaaaaaactgaatttctttgcattccatccacaaccagaccctagcggaggatatagcgtggaggtcttttctgcctcaaaacaagtggtgcgttattctgtacctaccaatgctaaatttcagaaagacttgatgtacgccatttcacgaggggtggacaaaaatacgaacgcaggaaaggttaagatattattcaaacatgcactctcacaggcatgcttcaaagcaaaaacagaaatggaatccatgagagttgatgttgaagatatccagatccacaacattgctgttgatggtgacttgacattaccacagactggtacagatatttccatgaaagattgggatactcaagaaaagaaacacatcgcgtttgaaccgaagaaccttgaaactccgattatggaaattggaacagaagccaaagaattaactggcaagatgtatttgccgcaggaacttacaaagtggactcgggaaactaagacgattgatcaggcaaatcaagaaaagcaaagttatctttcagttttgtgtaaaattaagcaaaatggggtttatctgtggggtagtgaagaaaaggctttgagattattcgttccttttggtgtaaaatgggaaccgggtaagagatatgtatatacgctgatcttcggtggtggatataaagatgacggtacccaggttcttgatcagattaaatgggaagttgaagagatgccttggcaagacgctccatacgatgtgaatgcagacataaatgtaaatgtcaactaatggttaggttacatagctcttacaaagtaggggctatgtttttacataagaatccattatatctaactcaaatgatttactctaatattgagagataatggaatgggatattatatgttttgaaaataattagtcgtaaattcatacatgagaatcatcttaatcacaatattgctttttgcagcaaccagtctgtttgcccaaaagacacgtcatatctctgtcgagattctgggtgcccaaaacacggtaggtatcaactacgacagccgtttcaaaggtacatacggtttgggataccgggtaggtatcggttatggctatggcagaaactcgggctggtttgacgagagtatcaagggcgtaggtgtgccgctggagctgaactaccttctcggaaagaagaacagcaagctggagctgggcttcggtgcaagtctggggatttatcgcgtgaagggagaagtggcatattataacaatctcgaatggtattcagataggtataatacctatgaaaaggtttctgaatcttattactatacgtcatcgggctgtcagttcggttatttcctcttcggagacatcggctaccgctatgagcgcgccggcggattcatgtttcgtataggagtgtctccgtcctttaattttggtgacaaacatggagtcacaaagtctttcttctacccgtacctcggcttcggatggtcgttctagggttttagctggaatagacgctcccatcgtcacggtaatggctactatatttcacctctgattcaattaaataaagtagtatgaagctttctatgtttaatcaaactaaaataactctcagaagactgttattcttgctgttgtctgctcttggatatgttacctgctgtcactgccttacctcctgcggcgatgaatatgaaaaatttcaaggtattgagtttaaaacgacaggggtagttctgtctcccataaactcacttttatatcatggcaaattggatggttccgcgactgatgtcacgattacagctataggcaaaaacgctaactatggattcctgtctctgatcaatacagatgactgtctctatgaggtcacggatgatgactggaagcaggcattgccttatactgtatgcgaaaagacatggggaaagatagagctcctgtccgcgtcaccttattccatccgtctgactctgaatgtaaaccagacaggggatgacagaaacctcgaactgacattcggcggcggatatgtaatttctactctgacattgaatcaaatgaagaggcagtaaaacatgacgaagttatcattcttattctttataatgacaattgtaaagtatttagaataactgcaataacaggaatccgaaaataagatttatatgaaaaattgtataacaaaacttctttcttcatccgtgcttatttgctgtttttggagttattctaaagaagatacaggagcaacatataataaacatatataacaggataccttagtccagagtctgcaattattaaagaacaagttttcaagaataaattctacgaacactaaattggtttcgcggaaatttgtattaaaattcaacaaatagccaaaatataagcaatgagtacctataatcacatacccattccaaaacagtgtcttctctttcttttagacatctctgtataaagatgaatttttcaatggaatttatctattttttattgttctgaaactaaatatgaaattattattacagcataaaattctattcggttatttgatatgcatagtagtcataggaagcatggtcgctattttgttacacgaacgtagccgagttcttcagatagagactgaaatgaaacaccttcaccatgtacagcacaatgtgaatacagcccaccgttacatcacgcttcttgctatgcatggcgaaactgcacttgcctgggaagaggacgattatacaagctattgttcactccgtctccgcatagactctatactgcaatccatgcacaaggaaaacgtggagtttgtcagcaaagagcaaattgactcccttagacatatgcttgccagtaaagaagagcatctttaccaaatcatgcaggcgtttcgtagacaagagaattataatgatttgccactcaaaagcttacccaaagaatttcaatctaaaaccattatacgcaagaaaaaaggacttgctggttttttgggtgcaaaagagacagtaaaaattacaccttctgaatcttctgtattacagtcgttaaataaaaaaattctctcctttcaaagagaacatcaggagtccatagatacgaatattgatagtttgcgtaaacacaataaggaactcaataaggaacttcgcaccttaattacctcaatggatgagcagactaaatgtattcttcaagaaaaggaacataatcttcaaaaatcgtacgatcaatctactcttattataacatggctcgtttcatctgctctttttatgcttgctatatcttacttgattattcaaagggacttacgagaaaaaacaaggacgaaaatacaattggaggaaacaatcaaacagaatacggcactccttaatatgcgtaagagtatcatccttaccttgtcgcacgacatcaagacccctttgagcatcataaccgggaaccttgaattggccatgaaaacggaggaggaaatgcagcgaaatattttcctgaaacacatcggagacgaatgcctccatgtggtacaccttctcaacaacctgctggatgtgtaccacctgaacgaagcgaacgagaaacgcagggatgtcccgtttaaccttcaagaaatgctggagcgtactgctgtgggattctcgcatatagccaacgacaagggcatccggtttgtcagtgatttcaaggatacggaagtcaggctatatggcgatgcggtccgcatagaacagatcatgcacaacctgcttgtcaatgcggttaaattcaccgaatccggcacaatcagtttccatgtccgttatcacaacggaattctgacgttggaaatcaaggataccggcatcggtatgaccgaggagacgctttcacgtatcttccgtcctttcgagcgcaaggattctgccgccaatgccgacggacatggcttgggactgtccatcacgcaagggctcgtaaagctgcttgacggaaatatcaaggtgacaagttccatcgagcagggaagcacgttccgtgtaacccttccgttacggcaaacggatgaaccggtggaaaacgagaagccggttgaactgcatcttgaacaccttcctcatcgtgtactgatcatcgatgacaacatcatgcagagggatgtcatcaagcagatgctggaacgcaacggtatagcatgtacggcatgcgcttcggtcaaggaggtggtcaaggccatgcgcgacatggattacgacgtacttctctctgacatacagatgcccggtaccgacgggttcgagctgcttgcccttttacgtggctcaaccatcggcaattcgcgtacaatacccgtagtcgccatgaccgcacgcagcgattacgggaagaaagactatcaggaagccggatttgcggcctgcatctacaaaccgttctttctttcggatttgctgggtctgctttcgaccataaagacttgccggaaggatgaaaaccggaaagtggacttcagcacgatgctggcagaggtcgatgacaaggcaaaactgttaggctcctttattgagcagtcaagacaagacgcggatgaactcgcttcggccatgcatggcaatgaccggaaaaggctgcgtgagattgcccaccgtatgcagccgatgtgggaattgttgcagatggaaaataccttgtccgcctatcggagcctgctaaaagacagcaccacaggcaatgacaccgtacgggaacatacaaaacgaatcatggaatataccgccatgctgatagcggaagcgaagaacgaaataaaaaaactggaaaatgaaacggaaaatactgatagttgaggacaatataagcttgtcgcagatgcagaaggactggtttgcacaggcgggatatgatgcggtaacggccatgaacgagccggttgcccgctcgttgatacgtaagattacattcgatttgattctttcggatgtgcgtctgccggaaggggacggcatctccctactggaatggctacgcaaggaaaagagggatatcccattcatcatcacaaccgaatatgtatcagtttcggatgtggtacgtactatcaaactgggtgcaatagactacctgcccaaaccggtacacagggagcatctgctggatttggccgaggatgtgttccggcctatggttacggtacggaagaaggagaaggtgctgtttcaccggacaagtccgaaaatagaacaggtggaaaaatacgcccggctggtggctccttcggaaatggctgtaatgatacttggcgccaacggaaccggcaaggaatcggtggcacagagtatccatcagggcagcgaacggtggaacaaaccctttgtggctgtaaattgcggagcattaccccgagaactggcggcttcgcttctcttcggacatgagaaaggggcgtttaccggtgccgataccgccaaggcaggttacttcgacatggccaaaggcggaacattgtttctggatgaaatcggaacaatgtcctttgaaattcaatccatgcttctccgtgtgttgcaggaaagtacctatacgccaatcggcagcagcaaggaacggatagcggatgtgcggatagtctctgccacaaacgaggatttgcagcaggctatcaaggaagggcggttcagggaagacctctatcaccgcttgaacgaatttgaaattcaacagccatcgttggctgaatgcccggaggacatccttcccttggccgagtttttccgtgaacgctattcaaaggagttgaaacgcgaaacaagtggtttttccgatgatgccagaagcaagatgcttgcctatccttggccgggtaacgtgcgtgaagtgcaaaaccgggtgaaacgctccgtgcttatttcggaatcaccggtattggaaatggaagggttggatacagaaatccatcagcatgataatgaatcaacagtcaaacctgctatccgcccgctgaaagatgaatcgcaggagaaaatgaacatcattaatgcccttaaagcctgcaacggacaccgggaacaggcggcagcgatgctcaagatcaatccggcaacgctgtacagaaagatgaaaaaatacgggttgaattaaaaaatgaagtccgtagctaatgaaaatctcgctgcatatgtgtacatttgcaagtaaatagagaaaaagcggcatatcgtctgtgagacggttgccgattgtatataacataagagcgcaagcttctcagacagaaatctggtaaattgacgttaaaggagaatgattgcgtaatgcttatgctatgctttgtcatagcgtggtattgcgtattctcctttaggctttaccagagccgctgtctgagtgcgtgataaccacgcttctttttttgacagatggcatggcaaagatacaggcagtaacggtaatgacgctggacggtttcctgccggaacctgacaacgtgctgacgcaatgggtaatgaaccatagaaaagggtttgttcattggcgggaacactgtaatgcctggattctacctcactccattctggatctgctctgcgagaaagaccacaaaaacgcttcttttacctatctggcagaagttcatgatgcagaatcccttgaacttctgcggggacttttccactacaatcttgtggatgaatttatagtttatctgtttccttattctatgggaaagggacattccgtacagaacattcttccttcccggcagtggcagttgcataaagccgttgctttttccaacggtatctgccgtctgatttaccgcaatccttgcaggatgtaacttgcattttgcgagatttcttgcatcctgcaagggcttatttccatcatttcttttctctgaaaatttttatttcactgtatttcaatggaatatcgatgctattccatgaaacatggtgacattggcataccgttagccctataccataatataacctgttgcgcgacaaggtgtaatcacccgattatttacactcaaagacagaccgtattatgatacagatagaccgtgaaaccttccagatgatgctccatcagatcatggaacggttcgacaagattgaagacagactgaaccgcatgaaccgccagacttctgcccttgacggcgacaagctgctggacaatcaggacatgtgcgagctgctcggcataaccaagcgtaccctcgcacggtaccgccaaaagaaactcgtggcgtattacatgattgacgggcgtacctattacaagtcttctgaggtagaggcattcctcaaccagaagggaaaacgtatgccggcaagactgaaaaaccagatggaataataaaacagaaaagaatatggaacttgtatgtattgacaaacagacttttgaagagctgcgtatccgcttctgcaaatttgaggaacggatgacacacatttgccgaccggtagaggacctcggcctgaaaaactggctggacaaccaggaagtgtgcgatgtgctccgcatcaacaaaaagactcttcaggcatatcgggccaaagggatacttcccttcagccgtataaagaacaagctcttctacaagccggaagatatacagagattgttggatttgagttatcaccctttaataaagagcagattatgagctatcatttcatagacaggaaagacccgcacattgatgtgatgtttcagggattggagaaattggagaagatgctttcggtattggaggaaatcccgagaacgctcttcaatggtgaacgcttccttacggatgaggaactttccaatgtcctgcgggtgagcagacgcacattgcaggaataccgtacatccggtgtaatcccttactacctggtacagggaaaggctctctataaagaatccgacattatgaaaatactggacgatgcctataagcggtgccgggaagaacaacgctgggtatagctggcatcattaaagtcagaacggagaaacgacctgccgggttgcggttgtttctccgttctccttttcatacggcttgcggtttccgtttccgttttttctttgtcgtgaaatcctcttcacataattctatgctgttaccgaagccggtggctctcaagcgtttcatgtcctcgtccacttttgtgtccgtgacctgtgcgtaaatttgcgtggtggaaatggaggtatgtcccatcatacggcttaccgtctctatcgggacacctaaagagagagtgatgtgggttccgtaattatgccgggcctggtggaaggtcaaatcaaatccataggtctttcccaattcttttgtcagcatgataaaataacagcgtccgtaaatgttgaataccttgtccccggttctctggctacggtacttctctatgatttggagaggaatatccagcagacggacagaggaaagcgtatcggtcttttggcggtggatatgaatccaccaagtgccgtcgtctgcctgcgtaatatcatttactgacaacctcttcaaatccgcatatgccagtccggtaaaagtcgaaaagatgaacatatccctcacgaattgtaattgcggcttctctacgggagtagtcatcaatgtcttgaggtcctccagcttcatgtggcggcttcttcttttggggagttcggggtgcagacggcagtatggatcccgtctcaacgtgccctggctgacagcccgcaccgtaagtttcttcaagcggtacagatgctcatgcacgcttttgggcttcaggttgcggtcggtgcgcaggaaaacttcaaaatcatcatagaacaccctgtcaagacttcgcaacgtgacatcttccatacccttcttttcccgtacaaatgcggaaagatgtttgtatgaacgctgataggactcgtatgtctcccgtatgcggtctatcccgacacgtttcttgaattcctcattatgctccctgaagagagccagcagggtaagcggtttctgtccgatacctttgactgcattcttgaccagttctgccgtgatgaaacctaggctgttctttatccgatcataatgtccggctatctcgcttgtcaggtcatctatggcgcggttcacagtaacggcattctcgcttcgtccatctgcacgccctttctccggattccagatagccggattgacagatactttggtacctatctgagcccattcggcatcgatgctcaccttgcacaacaactggcacatcccgtccttgcgtatttttgtacggttgatataaaacagcacggcaaatgtgctgcggcgtttggtattctgtttctcaatattctgttccatatactttccattttagggtttattaaatgacgacagaaaagcgttctgaaattttccggttcagtgcctttgtatcggcatctatcttgtcatcggttactttcgcataaatctgggtggtttctatctgactgtgtccgagcattttgctgactgtttcaaggggtacgccatgggaaagtgttatttccgtagcgtatgtatgacgggcggcatgaaagaccaacggacggtttatgtggcagatttgcgcaatctctttcaaataatggttcagcatagaattgcagtacatcggcagcaacttgtcatcgggagcagtgtcgctgtacttcttcagaatctgtagtggcaaatcaagcaacggaatctcaaattctattttggttttctgtctagcactttttatccaccatgtcccatcttctgctgaacataggttgcttttggtcagcagacacatatctctatatgaaatcccggtaaaacaggaaaacaaaaacatatcacggacatgatataatgtctgtctgtgaagcggagtgatcatgattctgtgtaactcttctgccgtgagatatttctgtatggctttaggacgcaccggctcgtatcccaaaaacggactggcggtaatgataccgtcagcgatggcttcgccgacaatcgttttcagttgtacggtcagattgatgattgttccgggggcgagattgcgttctgtccgaaggtacaaatcatacttgtcaataaaggaacggtccagtgctgagaacggaatatcggagagtttgtattttgtctgcaagaatctttcgatatggttgtaggcattccgataagcacgcaagcttttcatggtacggtttactcccacacgcttttcaaaacaattgataaatcgtctgaagtagcccaaaagagtttcctgtccgctggccattccaagcagaatactttttatctcttctgctgtcacaccgtcacgtacagccgacagttctgagtagatacttaaagccatcgcacgaatctcgtccaaacggttgtttatttcctttgcagccatactcttgcctgacgcacgtccggaagtccagcgcgactgtgaaactttcatcttcacactgaatgccgcttccgagtatttcccgacgcttaacttagccattacagggcagtttccgtcaacatccgcctcgctctttttcaggtagaacgatacctttacatttgcttgattcataactaattcctttgtttgcaaaattattatatagcgagcaaatgaatggcatgaaaaatatagcggaacggagaataaggcccttcgcctaacaaacaaaccctgtctttttttctaatacggaaaaatatgactaagtttgcatgatagacatagcaagaaacatcgttccatgcagtgataaacaggatatgaaaagtagaaatggaagctatttccaaccctctttttcaacccggaaaaggcaacggataagtagcgatttgttttccgaactccctcaaaaacggtcaaaaaccacaaatggaagaatctggaacaaagctacatattcctttagttctcaaatactttgtactatttcctcaaaagttatccgtatgtgggcgagttttcttatctttgtaccaaagaaagcgatcatttgaagaatgaagttctttgattttgttaccagtttgttacctataacggaaaatgtgttcgctttcttttgatttttaatcagttataaaaccatggggatgaccggttttgacagcgggtagaagtggtttgtaagcatgtagtgcgtggttggcttgcacttaaatctcagacaacgaacaattaactggcgaaaataattacgctctcgctgcttaatcgaagtatagtagattcaagcttaatccctgcaaaagttgcggggacgtgacatcacccggatgctgtggctccgaagcgttccgatcaggtggtgcagcaatatcggagatagtttgagataagcctcgggtctcaggcgaaactttagaggataagggatgagtgggtggcttcggtcttgctcttccccgacaatgaaggcgaagataaacatgtagaaagcaaattaattcctcgtttggacgagagttcgaatctctccatctccacggaatgaaaaaaggtcttacggattgtccgtaagaccttttttcattcattgtaaacccatttataaggaggtggcggtacgtatggaccagccttttgatggggtaatatatcaaccgatttgacgattacgttattacctttctgggtacaaaccagacattttgaacgtaatttccttttagccatgttgaagacgatattcggattgaaatgaactccgtttatacgagtctcaaaatgtaaatgctcggtagtagccctgccggtacgtccggttaaggcgatcggttgtccggcgagaacacgatctccgggtttaaccaagttcttggagttgtggctatagatcgtttccagcccattataatggcggacaacgataacgttgccataggcggcgaatggtttcgccatcctgacaataccatcgaaagcagacacgatcgtatcgttggcacaagtcttgatatctactccggaatgatgtcttctccttcccccgtaaggagagatcacgtttccattaggaaggggaaatgcgtattccccggcggggatcaaggataaatcaataatttccgtgttattctcatcgaatagcttggggtccttgatcgctatctggcttttatcacggggcgtaaaggcttccgtgatatcttttctaggagaatggcaaaccgctagctccggagcttccggcaacatgaaattgaaatccatgacaggaagaggaatattcgccgtagggaaatccatagtcttgggaggggccgggcgtggagcaggcttttgcgtacggcaagacgcaaataaaattagcgtaagaatgagtattccattgtgtattttagatgccattagatattgttttaccacaaaagtataaaaaagcctctttcaatgacctatatttccgatatgtttatacttctttttattctttgtgttttttctgatagttgaatttgcctacctttgtaaaggtaaaatggagatattatacgatgattgaggggactagtttgtctctttggtcagggaggatgacgatattgtatttgctggtatttctctaaactgaaaacgaccaatttaaagtacacagagaaatagacaatgcgaatacacctgtattaggtgtgttcctttgccttatttctgttgtgtacaaggcatttggtcgtgccgcagtttgacgggtttaaggtaaagtgtaacacaccttttctcagatgtgggtttatttatgagataagattaccttaaaaacggcttttgtatatgaaagaacaaaaggagatacatatcggttcgttaataaaagagaaaatggaagagcggggactttcggtttccgattttgcccatgcgcttcattatgaacgtaccaatatttataagatatttaagcgaagcagtattgatgttgatttgttactgcgtatatcggaagtcttagcctatgatttcttgcgggaggtgtatttagcggacgaaccccgacgatattcaatcactatagaagcggacaaggaagatatagaggagatccgtaaatggctgttagagaaaaggcgtgaataagtttcacgctttcgtgaaataagatcacggtcgatataagaccggtcactttgattgtttctacatttgaccgtctcgatgtttcatcataacattagagaaataggttaaatcaaggccgtgctcttcttgttccgtatgtgaatataggcaggaagaaagcggccacttttttcttctgtgtacgtgcacaattcgattatttcctttatatttgtcgataaacaacgaattgttaacatttctaatatgaaagttctaaagaccgccctgctattcctgatgtgcgtatctttctccttctcctgtaaggaaggggtaaaggaagtaagggtgctgaaactggcgcacggattgccccccagccattccgtccatttgggattgctctatatgaacgagcgtctgaaagagttgtccggaggaaagatgagcatggacatttattcttccgctcaattggggtctgaaaatcaatgtatagagttgcttcaaataggaagtctcgatatcacgaaagtttcctccgccgcgttggaaggatttgccgatccgtttaaggtatttggcataccttatctattccgttcccgtgagcagtttttcgaggtgttggatggttcggtaggtaaacagatattgggatcaacggaaccttattggtttaggggactcgcttattttgactcgggggcccgtagcttttatacggtaaacaagcagattcgtactcccgaggatctgaaaggactgaagatccgtgtgcaaaagagcccgatagccgtggagatgatgaagacattcggaggttcggctactcccgtggattggggtgaattgtatacggccttacaaagtaatgtcgtggatggagccgagaataatacgccttccgtgacaacagcgttccatcatgaggtggtaaaatactattcagtcaatgagcacacgatgtgtccggacgtgatcatcattagtttggctacttggcagaagctgacggaacaagaacgtaattggctgcggcaggccgctgacgccgccgctatttatcaacggaaactttgggcggagcaagagaagcaatcgctagaggagatggaagcgcacggagtggaaattatttacccggataagcagccgtttatggatgccgccgccccgatgatcgagcggtttaagaatgatccggtttttcatgatttaatcgatcaaatacagaatacccatgagaaagataattgataaaggattggagctatcgttgattttcttgatggctttcttggtcgtggatgtgttatggcaggtattaagccggtatattctggtttccccgagttccgtgacagatgaattggccggatatttattgatctgggtgggattgctgggggccgcttatgtatccggtaaaaatgagcatctagcgatcgatttattacttcaacatatacgtccttcccgcaggaagctcttgcgattgtttatcttcttgatcgtatttttattcgctgtatttgtattgatcgtaggtgggacttggctggtatacactcgttttcatttgggagttacttcggcttccttagagattaatttaggatatgtgtatttggcattgccgctaggaggattgcttaccgcttattatgcggtagataacgcgatcaccttatttcgttcctctaattcttaaaagactgatgatatggatattataggtatactcgtattagtgataagtttctttttcctgctggtggtcggggttccggtagcgtatagcatcggcgtggcgggtatattgacgatgctcgtgaatatagactcgcttcccgcccttacgacttatgcgatgcgtatggcttcgggtctggacagtttcgctctgctggcgatcccgttttttatattggcggggaatatcatgaatagcggaggtatcgccttgcgcttgatcgatttcgctaaagtgctggtcggacggttacccggaggactggcggtagtcaatgtcgtggcgaatatgttattcggggcgatcagtggctctgccgccgccgctgcctctgctatcgggagtattatgacaccggagatgaaaaaggccggttacgatccgaatttcagtgccgccgtaaatatctcttccgccactaccggcatgacgatacctccgagtaatgtcttgatcgtttactccttggcgagtggtggagtctctgtatccgccttgtttatggctggttatctaccgggaattcttacgggagtggcgatcatgatcgtagccgctatgtttgccgcacgaaaggggtatccggttggcgtacgtgttccgttctcggaggcgacaagggtatttttcagggcgatccctagtttgatgctattggtgatcgtgatcggaggaatcttggcgggactgtttacggcgaccgaggcttcggcgatcgctgtattgtatgcgttaatcctctcttttatctataaagaacttacttgggctaaattgccgcaagtgttattgcgatcggccaagactacggctatcgtccttcttttggtggcgacttgtacgggcttatcttggatcatgagctatgagaatattcctcaaacggtaagtgccgctctgctgagcataagcgacaatccggtggtcatcttgatacttatcaacgtgatcctattgattgtcgggatctttatggacatgacgcccgctgtattgatctttaccccgatcttcctgccgatagcgacggggcaattagggatggacccggtacatttcgggatcatgatggtgttgaacctttgtgtgggattgtgtacgccaccggtgggttcggtattgtttatcggatgtagcgtggcggggacaaagatcgatcaggtgatccgtccgttgctgccgatgtttgcggcgatggttatcgtcttgttcttggtggcgttcttgccggatttaagcttattgattccccggttgttcggtttgtgatgttcctccatagggtcgaggtagccttgtgctataaatagggcagtactctgtacgaagtattccagtacttacgtgctgagtaccgcaatacttcgtgcagagtactgtagtacttcagtcacagtactgcggtacttcgtacacagtactgcgctaactgtaagacgctatctttttaatgtcctttgaacagggataaggcgatacccatctccaatccccgtagctcggccagaccccgtaaacgtccgatgcaggagtagcccgggttggttttcttctttaggtcgtctatcatttgatgtccatgatccggtcgcatggcgatggagcattggcggcgttgctgcaattcaaggaaggctttcatgacaccatacatgtccacatcgccctccagatggttcgcctcgaaaaaattaccctccgagtctcgttgcgtgctgcggaaatgaacgaaatcgatccgatccccgtaacgttccatgatcccggccaagtcgttatcacttctgacaccgaaagaacctgtgcataggcaaagcccgttgctaggattcggcacggcctctattaacttccggaaatcatcttccgtgctcaagatacggggaagcccgagaatggaataggggggatcatccggatggataacgagcttgacaccggcctcgtccgccacgggagctatttcccgtaagaaatagatcaggttcgagcgaagtctctccgcgtcgatatctttataacggtctaacgcttccctaaactgctcgatcgtaaaagtctcttccgagccgggtagtccggcgatcatattgcgaaccaacagctggcggtcttcctcgctcatagcgtcatagcgtgccttggctttcgccttgtccgcctccgtatattcggcttccgccgccggtcgtttcaatatgaataagtcgaacgccataaaagccgcgcgttcaaagcgcaaggctttggagccatccggcatcgtataagccaaatcggtacgagtccagtccaataccggcatgaagttgtaagtaactacccggatatcgcaagctcccagattacggatgctttgtttgtagttctctatataggtttgaaaatccccggtttgcgtcttgatatgctcgtgtacgggcacactctcaaccacactccaccgtaatccggcggattcgatcaaggctttccgcttttgaatctcttccgtagtccaaacttccccgttcgggatatggtgcaacgcatttacgataccggtggcacccgcctgacggatgtcccaaaggctgacaggatcattcggtccgtaccaacgccaagtttgctcacatagatacataatgaataatttttaaatttatcaatgtgccaatatgccaatgcggtttgatgcatggctggttggcacattatttagatggagaaagcgtcgaaacctccgtctatggggatcacggtaccggttacgaatacggaggcgtcgctcgccagccattgtaaagtaccgagtaactcctccggttttcctaagcggcggaacggcgtgtgtgcgacgatcgtgttgcaacgatcactaggtgatccatccggattgctcatcaatgcccggttctgctcggtaaggaagaatcccggtgccatggcgttcactcgcaggccctctccgaatttaatcgccagctccccggccatgtattgcgtgaaattgttgatagcggcttttgcgcatccatagccaaccacacgagtcaatgggcgtagggatgattcggacgagatgttaataatgcttcctttcccttgtcccaccatgacctcggcgaagaccattgtcggcagtacggtcccgaataagttcaggtctacgactgtccggaaagcatcgatatccagatcaaagatcgtcttgtcgggaggaatcgtcgctccggcttggttgccacccgccaaattgactaaaacatcaatcttcccatatgctttcaatatctcttgtttgttttgctccagcaaggctttatccaatacgtttgaaaccaagaataaggcctcgcccccttccgctttaatctcattgaccaaggcagatcctttttgctcgtttcgtccgaggattacgacgtacgcgccttctctcgccaagtgcttggccatgcaggctcctaatataccatagcctccggtcaacaaaatcactttctcttttacgctaaataaggagttcatcagatataattattgtagtattgtatattttcctttaccaagatatcgatcggcatataattgacaggctcaattttctccttaaggatcagatgcctgaagagtgccttgatacaatgatatccttgtacctccggtcgttgggcgatcaaatgcgtgatcaagccgttttccagataacggacgttcggttctatcacgtcgtagccaagaagcttgaaaggatagtccggccgttcgctacttagataatctccaaggaaatgggccctcgaattaaagatgataccgattcttacttgaggatatttctcgaagaaagtattcagtagcctcttattctcctccttatcatctgcgtgcacatgcagcaaatgaatctttcccttgaatggggtgttggcgagataatcccggaatccttcctctcgtttctgcacttgcgtagaacatgaatcccctttacgggtgaaacggaaaatcactagatcgtccccttgacggatttgctcgaataaaaggcgtcccgctatataacccgaatcatatgaatgcgttccgtaataagagatacaattcgtgtgatcgataaaagaatcgatcaatatataaggaatacctttctggtctagccgctgggtcaaggtcaagacactttgcttaaataatgtagcgatgataaccccttggcaatccgcggtctcaatcttcgggattaattcgtcgaaactgttgctgtcgtattggtcaaaatagatttgctcgacatcgatattatagctaaacaattcccgttttgctttctcgatcccttggcttagtttcgcccagtattccccttcatggaaagaagggatcaaggcgatgaaatgatattttttcttcaacgctaaagaacgggctatcagatttggttgatagtcaatttcttttaagattttctccacctttttccgtgcgtcctccgatacctttccccgctcatgtaaaatgcggtctaccgtaccggtcgatacgccggataattcggcgatatcttttatcctgtaatttttattcatggtatagattgtagtgtgtattcgtcctctctgtttattcgagtatttgaagaggtgtgttcaatttacggaaaacgtagccatacatcatatagataagaggaacggcgacgaaaattccgataccgaacaaaatacatcctaatatcaggatcccgatcattaccaacgccagaatgaacagaggcaatgcttgtcctttcgttatctcccagcttttatgcaaagactcgataattccagcgttttcctcgataataaaggcttggaagaactgaaggcgcaatgccagataaataccggggatgataaaaaataagaaacccgccaatacgacaaatcccgtgataagactcgctagaaagtaggtgatgatattctttgtctgttgtccatatgcggaaaactgaggttcttccccatccaacgcctgaaatatatttttcatatatcctaaggagaaaataatggagaataacgcgctgatcacgtttacgatgattttaccgataatagaactttgcatgggcatcgcgaacgctgtcagcgtgaaagacaagatacaatatccgattaataatccggctaatatccatagttgcgacttcgttcccttccatgcggtactgaatacttctgatattataaatttaggttccataatgtataatatttgtttattgtgtgtggacacaaatgtaaaatatattgttgaaaaaaacaattttattttcgtttgaaaccaaaatagatgtatttcaacaggtgcttccttctaagtgctattaatttaggtgaaaaagataagtaggaaacagaaaatcgtgtaaaaagtttctacatttgtaggatgaaacagcgagtaaagaccctattgtgtgaatagatgtaaaagatctccacttgggttagaaagagaaggtaactgaaaaacagccttgaatatataattatatacaaatatggataaacgaatgctgaaaattacgattactcagttaaggcagatcgcattgtttgcggttggtatgtctttattaactgcctgtggaaacagtcagagtggtatgaaattaggggatgctgagttcgctgtgatggcggtcaattcaacgactagcgaccaaacaacatcctatccggctaccatcaaaggtacgcaggatatcgaagtccgtcctcaagtttctggatttatcgtgaaattatgtgtggatgagggagctacggttcgtaaaggacaggcgttgttccaaattgatcctacgcagtacgctgctgcggtaggtcaggctaaggccgcggtcgagatggcgaaggcaaacgtaagcactttaacattgaccgagaggaataagaagactttgtttgatcagaaaatcatcagtgatttcgagtatcaaacagccgtgaaccagctgatgtcggcaaaagcgagcttggcgcaggcagaggctcaattggtgagcgctaaccagaacttatctttctgtacggttacaagtccctcgaacggtgttgtcggtacattcccgtatcgtgtaggtagcttggtaagcgcttcgatcgctcaaccgctgactaccgtatctgagatcggtgatatgtatgtgtatttctctatgacggaaaaggagttattggcattgacgaaagccggtggtaccttgaaagagcaattagagaagatgccggccgtaagactgcaattggcggatggctctacgtaccatcatgagggtaagattgatgccgtgagcggtgttatcgatcaatctaccggttctgtaagcatgcgtgctattttctctaacgagggaaatgtcttacgaagcggtggtactggtaatattatcttcccgtatacgatgaacgatatcattacgatccctcaatcggctaccgtggagatccaggataagaagttcgtatttgtattgcagtctgataatacggtgaagaatacggagatcaaggtttccaatttggatgatggtaagaactatttagtaacaaatggcttgaagtctggcgataagattgtcgtggaaggcgtacagatcttgaaagacggtcaagagatccagccgattactcgtgagcaacaaaaagcaaagtacgatcaggccttgaaagaccagcatgacggtaatttgcagaccgcttttaattaatatgtaatcatagaataagacaaatattcgcttttgtcgagtaaaaacgaaaaacatgaaattagatagatttataaaccgcccggtgctctccacggtgatttccatcttgattgtcatcttgggtttcctaggcttgatttccttgccggttacccaatatccggatatcgcccctccaaccgtatcggtgagagccacttatacgggtgctaacgcgcaaaccgtattgaatagtgtgattgcgcctttggaggaccagatcaatggtgttgagaacatgatgtacatgagttctaccgcctcgaataacggttccgcggaaatttccatttattttacgcagggaacagacccggatatggcggctgtaaacgtgcagaaccgtgtgtctatggctcaaggtttgttgcctgccgaggtaacgcagattggtgtgactacccagaaacgccagaactctatgttgttggtattttctgtatttgccgaggacgatcgttatgactctgagtttttggagaattacgcgaagattaacttgattccggaagtgcagcgtgtacatggtgtaggtgacgcgaacgtgttgggtacggattactccatgcgtatttggttgaagccggatgtgatggctcaatataaattaagtccgagcgatgtgaccgtagctttgtctgaacaaaacgtagaggcggctccgggttcgtttggcgaaaggggtaatcagtcctttcaatatacgattcgctacaaaggacgtttgcaagaggttaatgagtttgagcagattgttgtaaaggctttgccggatggtgaggtcttgcgtttgaaagatatcgctgatatcgagttggggcgtttgacttacaactttatcaaccgtgtaaatggtcacgacgccgttacctgtatcgtttaccagatgccgggaaccaacgctacggaaacaattagtaacattgaaaccttgctggaggaaactcagttgacaatgcctcccggaatgaaggtgaatatttccatgaatgccaatgacttcttgttcgcttctatccatgaggtaatcaagactttgttggaggcgttcgtattggtgtttatcgtggtatatgtgttcttgcaggatttgcgttctacgttgattccggctatcgctattccggttgccttgatcggtaccttctttatgttatccttgatcggatttagtatcaacttgttgactctttgtgctatggtgcttgccatcgcgattgtggtcgatgatgcgatcgtcgtcgtcgagggtgtccatgccaagttggaccaagggtacaagtcggcgaaactcgcttctatcgatgccatgagtgagttgggtggcgctatcgtctccattacgttggtcatgatgtccgtgtttattcccgtaagtttcatgggaggtacggccggtacgttctatcgccagtttggtctgacgatggcgatcgctattggtttgtccgctttgaacgccttgacattgagtcccgccttgtgtgcgatattcctgaaaccacacgatacggaacataaggaaaagaaaacgaccttcgtttcccgattccatacttcgtttaatgcggcttatgattctttgttggctaaatacaagaaaagtatcgtattcttcatccagaagaaatggctttcattcggtattgttgccgcatgtattgcgttattggtgttcttgatgcaggttactcctacgggtatggtgccgaacgaggacacgggtacgattatgggtgccgttacgttacccccgggaacttctcaggagcgtacctttgaggtaatgaataaggtggatagcttgatcgctgccgatccggccgttgagtctcgtacggcggttgtcggttttagtttcatcggtggtcaggggccttcttacggttcattcatcatcaagctgaaagattgggaggagcgttctatgatgcaaaattccgatatcgtatatggtagcttgttcatgcgtgcccaaaagatcgtaaaggacgctcaagtattgttctttacgcctcctatgatccccggttactcagcgtctagtgatatcgagttgaatatgcaggataagaccggtggtgagttggatcgtttctttgatatctccaaggaatatatggccgctctgacggcacgtccggagatcaagtccgctcaatctacgtttaacccgaacttcccgcaatatgagatcgatatcgacgctgccgcctgtaagaaagccggtattagtccagctgatatcttgtctaccttgcaaggatattatggcggtttgtatgcctctaactttaaccgcttcggtaagatgtaccgtgtaatggtgcaggcggatcctgatttgcgtaagaatatggaatctttgaaaaacatcaaggtaaagagtggtaacgatatggctccgatttcccagttcattacgatgaagaaggtgtacggcccggatatcatcagtcgtttcaatatgtacacttctatcaaggtgatggttgctccggcggatggttataccagtggtcaggcgttgaaggcgattgacgaggtggctaaggtaacgcttccggcaggctttggttatgagttaggaggtatggcgcgtgaggaagcaagtacgagtggtagtacgacggctttgatcttcttgctgtgtttcgtattcgtttacttgctgttgagtgcgcagtatgagagttacatccttcctttgtccgtattgctctccgtgccgttcggtttgatgggtagcttcttgttcgtccaaggttgggccgctttgggaaatatcccggcgttgaagatgatcgtaggaaccatgtctaacaatatctatatgcagatcgccttgatcatgttggtaggtttgttggcgaagaacgctatcttgatcgtagagttcgctttggaacgtcgtcgtatgggtatgagtatcacatgggctgccgtgttaggagccgccgcccgtttgcgtccgatcttgatgacctcattggcgatggtggtcggattgttgcctatgatgttcgcattcggagtaggagcgcacggtaaccgtacattgggtacagcggctatcggcggtatgttcatcggtatgatcttccagatctttattgttccggttttgttcgtggtattccagtacttacaggagaaattcaagccgatcgaatgggaagatttggataacagcgatatgagtacggaaatagaacagtacgctaaaataaaataagagatgacaatgaagaaacaaattatatatatggtatgtgcgactgctttgttaagcagttgccatatctataaggcatacgagcgtccggattccatcgatgcgacgggaatttatcgtgatccggtttccgagactgatacattagcctccgcggatacgaccaatatgggaaaccttccttggaaggaagtttttcgtgatccgaagttacaggcgttaattgaggagggattagctaataacgtagatatgcaggcagccgttcttcgggtagaggaagcgaaagtattgttgacttctgcccgtctgtctttcttgccttctataaaccttgctccccaaggtacgattacgaagatggaaagcagtgggtatgtaaaagcttacacggctcctgcggccgctagctgggaggttgacctattcggaaagctcttgaacgcgagccgtggccaaaaagcctcctacttacagagccagtattcaagacaggccgtgcgctctcaattgatcggtggtatagcgaatacttattataccttgttgatgcttgatcggcaggtggaaattaccgctaagacggttgatatctataaagagaatgttcgtgtcatggaggctatgaagatagcgggtatggctaccgaggctgccgtgacgcaaatgcgtgcggcttaccatcaggtttccggctcgttgatcgagttggagagccaggtgcgtagcgtggaaaactcattgtccgtgttattggctaaggcccctcaacagattgatcggggtactttggaggaacaagtaatgccggaggatatcatggtgggtgtgcctttgcaattgttggagaatcgtccggacgtgaagatcgcggagatgacacttgccagtgcttattatacgacgaaccaagcccgtgccgctttttatccgggattgaatatcacggcgacagcaggctggacgaatggttcaggcatctctgtcgccaatccgggccaatttatgtttcaagctttggcttcgttggcccaaccgatcttcaacaatggtaagttggtcgctaacttgaaggtatctaaggcagaagagaagatcgctcaaatgaattatcagcagacaattctggaagctggtaaggaggtgagtgatgctttacatcagtatgatgccacgagcaagaagcttgtgcaagacagagcgcagatcgagcagctagagaaagcggtggcttataccagtgccttgttccagtcggctcaatctacttatttggaaatcctttccgcccagcagagtcttttgagtgcccagttgacggaagtgtccgacaatgtgcagcgtatgcaagcggttgtcagtttatacagtgccatcggtggtggtagagaataataaccttaaatgtagtaaagttatgattagtccattagcatatgtagattcaagcgcaaagatcgggaagaacgttacgattcatccttttgcgtacattgataagaacgtggagatcggggatgattgcgagatcatgcctcatgccagcttgatgagcggtacacgcatgggaaatcgcaaccgtgtatttaacggggctgttatcgctgctgagcctcaggatttcttttataagggaggtgatacgatcgccgtaatcggagatgacaacgtgattcgtgagaatgtggtgattaaccgttcctcgacagcggaaggacgtactagtatcggtaatggtaatttcttgcatgagggggtacatgtttctcatgatacgcagatcggaaactgtagtgtattcggctatggtagtaagatttccggaaattgtatcttggaagattatgtgatcttcggaggcaatgtattgatgagccaaggatcccgggttggggcttgggcgatgattcaaaccggctgtcgtttccgtaaggatatacctccttttatcgtagcggctcaagagcctaccacgtattatggcgtgaactctttcatcatgtctcatgagggattcagtgaaaaggttatcaagcacatcagtcatgcgtaccggatcatcttccaaggaaacagcagccttacggatgccttgttaatgatcaaggatcaggttccgatgagtaaggagatccaacatattatagatttcgttggtgagtctaaattaggtattgtcaaataaataccaataacaaacgataggtaaaagccgaaggaaatcatttcctccggcttttttatgtaatggaaggacggtttggttaataatgtttgttaaataatggtaaacgtgcagcatttgtctctttttaagtgtcttactaataagacaacacacaatgaaatccaataaaggaggtttaatatgaaaaagtcatttttattatatcttatcatgtctgtatttctcatcggttattgcgcttgcgataatgatgaggaaaattttgatacggctactaccggacaagtgatcaaagtcccggatgatatcaaatcttttaattcagttacaaaagaaatcgttttcgagaagaatatttctatcaagcaagacgtgcgaggcaatgagaaggttgaattccggatagctggaaacggtcacttcacggtaggcagtatctcttcgataagttccgttatctataatgccccagtcttattaggggattatcagagatattatttatatgatggatatcctgttgtagatgttctacaaaatgaggtaagtaaccaagaggaaagggacgaaaacatgcaaaagatagagaaagcttggagcaacttcctgaaagtattgaatgaggctggaaagttgaagtagtgattaccggtttgggatgtaattctgcgatacatcttttttgcgcatttaataagtacgttctgtattacatttgctagcgtttaaatttaagtaaatgtgatgagtatgggaaagaacgattttgtatgcggacgtacataaccgagttatgtgagggaggacatcattctacggcgaagagttatcaagatgccttgaattcattcaagcggtttagtggtcgggaggaaatcccttatacctatattaataacgagaaccttctattttatcaaaatttcggagaaactttgcgtcgacagattggagaaacgtgtggcgagccagccggaaggggagaaggattatgaggtctatgtcgcttcccaaaaggagatgagcctcactgctgcaggcaagcggaagtgggtagaacgaatcctgttccgctccatagttttcatccgctgtaccgataccttacgtagaaaggagatcgtgcaccttccatacatcaaacgtttcatggtgaacatcgccggagagaggcgaggcggcatacgtcccgtggccttcatcccggacgatcagatggccaagcttcgccggatagtgggacctgttttgtgattcgcatagacttgcttggctgtgccaaggtcagtatttcccgtgatctgcttggtggggtttctttgcttgttgctaaattatatgcatgtatgtctgaaaaaggcagacaaaccctgtatcgtggcttttgatgaatttcagcagatttccaaataccctgaaaaaaatattgaagctttattgcgctcccatattcagcatttatctaatgtgcattttatcttttcaggcagtgagcgtcatttggtaacggagatgttcctctcttccgctcgtccattctataacagtacatcgattttggaattgtatcctatcgtcgctgaagaatacataccttttgtctgtcattggtttgatgtgtatgaacggactattcgtgaggaagatgtattggttatatatcgtttgtttgaggggaatacatattatatgcagaaaacttttcatgaagcttttataaatacccctataggcagtagttgtacgttggatatattacggcagacagttggtggagttttggaaaaggcaggcgatggatatcgccaactattgtccagaattcccgaacgtcagaaagaattgctgtatgccatagcctcagcaggtaaggcggagaagattatgagtgccggtttcattcgtaaatattcattggtctccagcagtgcagtccaagcggctgcccgtaaactgatgaaattggatttgctgactgaagaagataatatttattttatcccggatattctgttccgtatgtatcttcagcggctaaagaacacgaatattatcttcattccgtcgtaactatccgtatccacataaaaagaaagaggccaaccccgaaggatcagcctcttttatcgctttaatagaaattcaaattaaagtgcacccacttctttcaaagcctcgttagtcttatgaacagcggcagcgctcttagcgaacaactctttctcttcagctgtcaattccaactcaacgatcttctcgataccgttcttgccaaggataacaggaacaccgatgcaaagatcagattcaccgtactcaccttccaagtaaacagagcaaggaaccatcttaccttggttgtgaatgatagactcaacaacaaatgctccagcagcacccggtgcataccaagcagaagtacctaacaatttagttaatgtagcgccaccaaccattgtggaagcaacaacctcttgcaatttctctgcgcttaacaatttgctaacagggatacctttgtaagtagccaagcgagccaacggaatcattgtagtgtcaccgtgaccaccgattaccataccctcaacctcgttagcgttacagcctagagcctgagataagaaatatttgaaacgagagctatccaaagcaccacccataccgatgatacggttcttcggcaagcctaaagacttcaatgacaaataagtcattgtatccatcgggttagagataactaccaagattgcgttcggagagtatttcaagatgttttgagctacgctcttaacgataccagcgttaacaccgatcagttcttcgcgagtcatacccggtttacgaggaataccagaagtgataactacaacgtcagagttagctgtcttctcataatcgtttgtgcaacctacaaccttagtatcgaaacctagcaattgagcggtctgcatcatatccatcgctttaccttcggatacgccttcctttacgtctagcattacaacttcgtctgccacttcattgaaggcaagaacatttgcgcaagtagcgcctacatttccggcaccaacaactgttacttttgacataataaataagttttagtatgttattacttaataatacgctatgttttttaacgatggcaaaggtacaatctattacggaataaagaaatatttccgtatatatttttgagggacattattaaatatcgctaaagccttgtcgaggcttcttgacaacttggtacgcttttatttttaagatcttgaggaaatgttgtatcttgggtgcgaacaaaacttaaccgagggaagttttatttatatgggttattaatcttaaatccaacgtacttatgaaagttcttatatatatccgaaaagtcctgtttttgtttctctgcggggccttgtctttctcttacggctacggtcaggagctgccgcttctgccggatacgatcaagcctctcttgtcggactccaatttgatagatgagttgatcactgtcggatatgctacgggcaatcgcagtactttatccggttctgtaaaccgggtgaatgaagggggaatgaatgagggattgatctctacacccttggacgctcttcggggaagggtgtccggcgttagtatcccggttggaggaaatagcgccgctgccttggctgccgtccgggtccggggtacaacttccttaacgggaggtaatgatccgttggtgattattgatggggtttttgccgatcttaatttgcttagctcgatctatccggcggatatcgagaacttcacgatcttgaaagatgcctctgagactgctcaatatggttctcgtggtgcttccggtgttatcgaggtaacgactaagaaagggcggcagggagcttttagtatcagttatgatgggagtttcggtgtggaggcggcttataaaagtttggatatgttatcggcgaatggtttccggaaactggcggaggaacgtaatatcggtattttagatttagggaataatacggactttcaggatgagatcacccggttagggttggtgcagaatcatcatatcgcttttgggggtggttcggagacttccagttatcgtgcctccttgggatttgtggaaagggaaggggttatccgaaatacgaactcacgtaattttacgaccaagttgaatattacgcagcatgcgttcaatgatcttctggtctttgatttaggcatatttggttccttgctgaaaaatgcttatttaaatgatgtacagaagatgttctattccgccgctactttcaacccgacatttccgaatcataagaatatggagacgggtagctgggatcaaataaccaacgctagccagatcacgaatcctttggcttggttggaggtgaaggatgatgattcgaatgctcatataaatacgcacttaaaactggtttttaacttgagtaagcatttaatgtttacggctttcggttcgtatacctataatgtaatagataacgcccaatacctccctacttcggtttgggcgcatgggcaggcttatcggggggagcggaaaacagaatctttattgggagatttcatgttggcctataaaaaagactttggtttgcatcaactaaatgtattgggattggcggaagctcagaaaatgataacgagaggtttttatacgactgcgacgaatttcagtaccgatcgttttggttatgataatttacaggcaggtgcggtacgtttatgggaggggaccggttcttactatgaggctcctcatctagcatctttccttggacgtgtgaattatatttatgatggaaagtatatcgctaccgtgaatgctcgagcggatgcctcctcgaaagtgggggcaaataataaatggggatttttcccttcggcttctgtcgcttgggtgttgaccgaagaggagtttatggaaggtatctcgtgggtaaggaatttaaagattcgttcgggatatggcctttccggtaatcaagacgcgatcgattcttacaattctttgcgattgatgaagcctaatggggttgtttccgtaaatggtgcgcccaccgttaccttgggtacgatccgtaatgcgaatccggacttgaaatgggaggtaaaacgtacgttcaatgccggtatcgatgccgggtttttcgacaatcgttttattcttgccgtagattattataattccaagacggatgatatgttgtatttatacgatgtaagcgttccgcctttcgcttataataaaatgttggcgaatctggggtcgatgcggaatagtggcgtggaattgggtattggcgtcacgcccttgcgtacgaaagatatggaattgaatataaacgtaaacgtaactttccaacggaataaattgctctccttgagcggttactataaaggggaatatatgtccgccccggaatatactagcatctcggatttaaatggggctggtttccatggagggtataatcatatcgtttatcaaatggtcggacagcctttgggtgttttttatttaccgaaatgtacaggtttggtttccgatgggaacggcggctataagtatgagattgaggacttgaatggaaacggggtgagtttggaggatggtgaggatcgttatattgcgggacaagccatgccgaaaacgcttttaggctcgaacatcagtttccggtataaacaattcgatctatcagtacagattaacggagcctttgggcataagatttataatggaacatcgctaacttatatgaatatggatatattcccggattataacgtgttgcgagaagccccatcccggaatatccaagatcagacggctacggattattggttggagaaaggggattatatcaattttgattatttgacgttgggttggaacgtgtctctgggtaatttaaggaaatatgtaagaaacgtacggctttcggtttccgtaaataatttggcgacaattacaggttattcgggattgactccgatgataaatagctctatcgtaaataatacgttaggtatagacgataagcgatcttatccggtggttcgttcctatacgatggggttgagttttaatttttaaaaaggtgttcgtatgagaaagctttctattttatcctatatatttgcgggtttgatgttatcgtcgtgcgatggctatctgaaagaggaccctcgtgatcagctttatccggaggatgcgtacgatacccctcagaatgtctatctgaatacggttgcttccttatataattatatcggcggttatagcgatagccaaggattgcagggaacgtaccggggtgtctacgacttgaatacctttacgactgacgaggccatgctcccgactcgtggcggcgactggtatgacggcggtttctggcaaggtctcttcttgcataagtggggaacgaatagtgacgctatccaagctacttgggaatatctgtataaagtaatcgtattaagcaatcaatctttagagatattaggcgagttgcggcaaaaaacggattataacgatttagatcggtatgaggcggaggttcgtgcttttcgtgcgatgtattattattatttagtcgatatgtttggccgtgtccctcttatcgtttcttcttccattccggtgaaagacgtgcggcagagtgaccggaaagaggtctttgattttgttgtaaaagaattacaagaatcccttttgttattgagtacggcgcatagtaattcgcccggcgattattatggaagaattacgagaccggttgtttatttcttattggcgaagttggccttaaacgcagaagtgtttacggataacgactggacggatggtctgcgtccgaatggacgggaaatctattttagggtaggcgagaggaagttgaacgcttggcaaacggttgtggcgtactgtgattcaataacagacttaaactatagcttatctctgaactatgcggataatttttctgtatttaatgaatcgtccggagagaatatcttcacgattccgatggataagaacttatatacgaaccaaatgcaatatcttttccgctcccgtcactataatcatgccaaagcatatggattggggggagagaacggctcttgcgctacgatagaggcccttcgggtatttgcgtatgggacggactcggtcgatacccgattttatgagaattattacgccgatacgatgtttgacctcaatggtgatacgattcggttagataatgggactcctttggtgtatttacctctagaggttaggttggatttgtctaggttgcctgccgagaaaacggcgggtgcccgcatgaagaaatacgagatcgataagatggggacgaaagatggaaagctatcggataatgatatcgtattattccgttatgcggatgtcttgttaatgagatcggaagcgaaagttcgtaatggagagaatggggatgaagagttgaatgccgttcgtttccgtgtgggaatgttacctcgtaaggcgacattagaaaatattttggctgagcgtcaactggaattggcttgggaaggctggaggaggcaggatttggtgcgttttggaaagtttacccgcccttatacggatcgccctcaattgccccatgaatcgaatggctataccactgttttccccattcccgataaagtccgttccttgaatccgaacttgacacaaaatccggggtattaacttgaattttgggtgaaaactaattctttgttttcacccaaagagcatatcttattctacatacaatactaaacctttcagatattccccttccggatggtagatattcaccggatggtctgcgggttgggttaattgatgtaagattcggacactacggccggattgggcggcagcgctaaatacggctaaacggaaattctctttactaactacttgagaacaagagaaagtaaacaagattcctcccggcttgatcttctcgaaagcgatcgcatttaatttgcgatacccttgtaaggcattacgtagtacattcttatgtttagcgaacgcaggagggtccaatatgattaaatcataattacttcccattttttccaaatacttaaacgcatcttccgcatatgcctcatgacggggatctcccgggaaattcaactcgacattctttttcgtcaaagaaatcgctttcgccgaactgtctacggaatgaaccaccttagcgcctcctctcatcgcatagaaagagaaaccgcccgtataacagaacatattcaatacggagcgatcctttgcgtaatgctccaacaaagagcgattctcccgttgatccacgaagaaacctgtcttttggcctttctgccagtctacacagaatttcagtccgttttctatagcgatatcttccacttcgcctccgaataagtaaccatcttcgctacctaaattcgctttataaggtaaagtcgcttcagatttatagtagatgttttgtaaagtatcgcccaataccgctttcaaagcctctgcgatctgatgacgggcataatgcattcctaccgaatgtgcttgcataaccgccgtatgcgcatacatatcgatcaccaatcccggtaaattatcgccttcgccgtgaatcaggcggaacgtattattattttctaccccagccagccgcaaggtctttctgagttcgtaagcaatacggatacgttcgatccaaaaagcatcgtcgatggggattggggtgaaagataacacacgtacggcgatactgccgatttggtaatggccgatcgccaaaaaacgctggttcgctccgtatacctctaccaagtcaccctcttccgggtcgccttcaacagattggatcgctccggaaaatacccatggatggaaacgcaatagcgattcttctttcttaggcttgagaaaaactttacaatacttcatttatgcttgattcaataaattatatattcttaggcaagcccaagcatcgagggccgcatatttcttttgtgagtctgtcaatacatctgcctcccaattcgtgaggcgttgtccttttgatatttttttttggaaaagtatcgcatatatcttttgcaggctggcatcctcaatgccgaactggcctacgtaattctgtaaatcaaggaaattggcgggttctatatccgaacgcttccgtatcgccccgaaatcatcccgtaaagataacccgatctttaaggtcgaactgcttttcaggaatttctccagagattccggtataccgatatgattcaagcggaacaagaaacaagtatcatccgttgatatctgcatcaatgagatcttgtaacgctgtcctttcttaaagctgggacgggtctccgtatcaaaaccgacgatcggaaaacgcagcaagtactctacggccttgtctgcctcctctttactaaggatcgtaatgatacgtcccttgaattcctctacggtaagtttcgctatttcctctttagcaattgtatgtataaattgttgtatcattcttcctcttcattcttttccaaatcctcatcaccactgtaacgcacagcgtgcaacgctttcaaggcattcaataattgctgtccccagtattcttggaagttcgtgcggcacaaagcgatagcctcttgcataacttcctcgtttccttgacggaataaagatacgaaatttcctgtatcttgatagacatctgccaaattctcggaaataaacgctgcgataggagtatcgctataccgcatatccgcatgaaatgtttccagataggaatctcgttcgccaagcaaaccggctatccgtgaacgaaccgactcgtacatgtcttctgaaacggaaagctcaagctcggtttcctcttcagattccacttcgggcaacaggctggcctttaaatataaaagaggcaaaagttttgtcgccttatctacgaagtcgaaaagcccggtatttccggcggcctcaacaaaggtacaatattccagtgctaccgtaacaaattctagcgtgttgcgctcgtatatcggattttcttctttttccatgtgcctgttcgtctaatcattcttgataacaattcgcaaaaatacaacaaaaatccgtttttttcgtgataaagccccgaatattctttttgctcttgagttcaaaacatcgtttatgttaatttgctttttttgtgataaaaacgaacgtattatttatgtaaacagaaaaatgatcttatatgttacgtaaaattagattaacactcgctgtcattatctttactatgaccactcttttgttccttgactttacgggggtaacgcattgctggttgggatggatagcaaaaatgcaattcctgccggccttattggcggtgaatgttggggttgtatcggtattattggtattaaccttactctttggacgtgtctattgttcggttatttgtccgttaggcgtatttcaagatgttgtttcttggatagccggaaaacgcaaaaagaatcgtttctcttattccccggcagtctcatggttacgttatggaatgttaggaatttttattatcgcttttttagcgggtatcggttctctggtggctctattagatccgtatggagcctatggacgaatagcctcgaatctttttgctcctttatatcaatggggaaataatctcttggcttattgggcggagcgtgcggatagttatgtcttttattctgtagatatgtggataaaaagtgtggctacgtttggggtagcgctcgttacgtttgtggttcttttcctattggcttggcgtaatggacgtacgtattgtaatacgatctgtccggtgggtacggtcttgggatttgtcgcccgtttttcttttttaagaccggtgatcgatgtagagaaatgcaacggatgtggcttatgtgcccgtaattgcaaggctgcctgtatagattcgaaaaatcattcgattgattatagtcgttgcgttacttgcttggactgcatcgataaatgtaaaagaggagctttgacatatgtgcctcgtaaacgaaaaacagaatcggagagagaggctgatcgacctgaagaaaacacccgccgtaatttcttaacctttacgggattgctggcgacatcggtattgaaagcccagtcgggggtaaatgcggatggagggttggcggatattgcggataagttaaccccggatcgtatgaccccgatagttctgcccggggctttgagtttacgaaacttcaccggacattgtacggcttgtcaactctgtgtctcggtatgttcgaatcaagttttgcgtccttctacagatctaaagaagtttatgcaaccggaaatgtcgtatgagcgaggatattgtcgtccggaatgtacgaaatgctccgaggtttgtccgaccggtgcgatccaattgattacgaaagcggacaaatccgccacgcagattggacatgcggtatggatcaaggaaaattgtgtggtgaataccgatgaggtaaattgtggcaactgtgagcggcattgtccgacgaaagctattcagatggtggcgaaagaccccaatgatcctaaatcattgaaagtaccggttatcgatacggaactttgtatcggttgtggcgcatgtgaatattattgtccgtctcgtccgttaagcgcaatctatgttgagggacatgagagacatcgtacggtttaataatctcaaaaaatgtatggtaatgagtaataataatatagatcgcaggaatttcttaaaagtattgagcaccggtacggccgctgcctcgacagggcttttatatggatgtggtggagatcctaagcggcaaggtgtgtcgcagaccggaagctatttgggtgaagtcccgacagataagatgacataccggacgaatccgcatacgggcgataaggtctccttgttaggatatggatgtatgcgctggccgttgcgtcagaaagcggatggatcgggggaagagatcgatcaagaagcggtgaatgcattggtggattatgcgattgctcatggcgtgaactactttgatgtggcaccggtttacgtgcgcggtctttccgaacaggcaacagggctagctcttagtcgccattcccgggataaatattttatcgccacgaagctttcaacccatcgtcctgtaccggaatggcgtactcttgagggctccaagggcttgttcgaacagtcgctaaagaatctgcgagtggattatatcgattattatctgattcatggcgtaggtctggggggcatggacgatttgaggaagcgcctttacgataacggtgtcttggatttcttgttaaaggagcggaaagccggtcgtatccgcaatttgggctggtcgtttcatggagacgtcaaggtcttcgattatttgttatccttggatatcccttgggacttcgttcagatccagttgaattacgtggattggaaaaatgcttctggttggaacgtgaatgcggagtatttgtatggggaattggagaagcgtaatattcccgtcgttatcatggagcctcttttaggcgggcgtttatctcggctgaatgccctttcgttggctaaattgaaacagatgcgtccggatgacagcccggcctcgtgggcttttcggtatgcgggctctccaaaaggagtactgaccgtgctgagtggtatggtgtatatggagcatttacaagagaacatccgaaccttctcgcctttggaaccgattacggaacaagaaaataaggctttggaagaggtgacggagaggatgctacattcggatttcgtaccttgtacggaatgtcagtattgtatgccttgtccgtatggcttggatattccgggaacgttcgctcattataaccgttgcgtgaatgacgagctggttgcgaagagttcacaggatgcgaattatcgggaggctcgccgggcgttcttagtcggttatgatcgtaaggttcctaaacttcgtcaagccggacactgtataggatgcgataaatgcgtaccgaaatgtccgcaaggcattaagataccggagcaaatgcgaaagatcgatcaatacgtggagcaattgaagcaagagactttatagtcttatttaaaatacctgctttattcgtgataaatccccgattattctttttagtcggggattgttctctattattacctgttttactatttttgtcgaaataatagaaggaatgttaatgatagactaatgttggatatactaataggataaaaaaccgatcgagttatgagttcatgtggaaagaatgagaaccctcaagagatgaatcgccgtaaattcttgaaggtatttgggggtggggctgtcgcctcttcggcggcgctttacggttgcgctcccaagaatgagccgggggcggctgtggcgttaggtgaggttcctaccgataaaatgacctatcgccaacatcctacgaatggcgataaggtttctattttaggatatggttgtatgcgttggcccttgaaacaaggatcggacggtaaagaccagattgatcaagaagccgtgaatcgtttagtggattatgcgatagagcatggggtgaattactttgatacttctcctgtttatgtacaaggtatgtccgagaaagcgaccggtatcgcattggcacgccatcctaggaactcctattatttggccactaaactgtcaaacttccagaactatacgagagaaaactcgttggcgatgtatcggcagtcgttccgtgatttgcaaaccgattatctggattattatttgcttcactctatcggtggggggaatggtatcgagcttttcaatgaccgctatataaataatggaatgcttgatttcttggtgaaagaacgggaagcgggacgtatccgtaacctaggttggtcttttcatggggatgtaaaagtgtttgattatgtgttggatatgggcgtgaaatgggatttcgttcagatacagctgaattatctggactggaaacatgcctcggggcgtaacgtaaacgctgattatctgtatggcgaattagagaagcgaggtgttccggcaattatcatggaaccgctattaggaggtcgcttatcgaatgttccggatcatatcgttgctcgtttgaaacagcaacggcctgagaatagcgtggcttcatgggcttttcgtttcgccggctctccggatggggtcttgacggtgctaagcggcatgacttatatggagcatttgcaagataatatccgtacctattccccgcttatcccggtaacggacgaggagaaagactttttggaagagacggcccagcttatgatgaaatatccgacaataccttgcaatgattgcaaatattgtatgccttgtccatatgcgttggatattccgggtattctcttacattataataaatgtgtgaacgaagggaatgttccgaaaagcgcacaagacgaaaattacgcgaaagctcgtcgtgccttcttagtcggttatgaccggagtgtcccaaagttgcgtcaagcgaaccattgtacagggtgtgagcaatgtaatcctcattgtccgcagggtatcgatatccccaaagagatgcagcgtatcgataaattcgtggaagagttgaaagtgaatggttaacctttaaacaaacggaaaattatgttacgaaaaataagaatattcgccgccaccttttgctttgtgctgataaccctgttatttcttgatttcacgggtacgattcacgcttggttcggatggttggcaaagatacagttttggcctgcgttgttggctttgaatgtcggtgttgtggtagggttgataatcttgactcttttattggggcgtgtatattgttccgttatctgccctttaggggtattgcaagatatcatttcgtggtttgctagtaaacggaagaaataccgcttttcctattctcccgcattgaagtgggtacgttatggtaccttggttatttttatattggcttgtatcgctggtatcggttccttggtagcgttgatttcgccttatagcgcttatgggcgtatcgcttctaatttatttgcgccaatctatcaagagggcaacaatctattggcctatttcgcagaacgtatggatagttacgcattctattcggtggacgtatgggtgcgtagcctggctacgatgggaatcgctattctgagctttgtcatattggcgattttagcttggagaaatggacgtacatattgtaatacgatctgtccggtaggtacggttctcggttttttgtcgaagtatgctttacttaaacctcgtattgataccgataaatgtaatggttgcggattatgcgcacgtaaatgcaaggcttcttgcatcgactctaagaatcatgcgatcgattatagccgttgcgtgacttgtatggactgtttggataattgccgtcaaggcgcgatttcgtatacgagggcacacaaggctgataaagctacttcggtaaaagaatcctcaacgaaggacactacggatgtttcccgccgtcgagccttgtcagctacggcattggtagccatgtcttctgttttgcatgctcagcagaaaaagctggaggattatgtggagatgaagaaagacggaggctttgcgccgattaaagaacgtaaagagccgaatcgtttggcaccattggttcctcccggagccttgagtattgggaatctggcccaacattgcacggggtgccagctttgtgtatctgtctgcgagaatcatgtcttgcgtccgtctacggatctgatgaaactgatgcagccggagatggctttcgatagagggtattgccgtccggaatgtgtgaaatgttcggaggtttgcccgacgggagcgatcaaaccgattacgaaagaagacaaatctgctatacagatcggtcatgccgtatgggtaaaagatctttgtattgtcaatacggacggtatgagttgtggtaattgtgaacgccattgcccgacaaaatcgatccagatggtggcgaaagatcctgcagatccgaagtcgttaaagatcccggtgatcaatacggaaacttgtattggttgtggtgcttgcgagtacctttgtccatctcgtccttatagtgcgatctatgtagaaggacatgagatgcacagatctatttaatgccgttaaaatctatccccaaaaacatgtacgtgtttccgcgaaaacatgtacatgtttttcagaaaacacgtacgtctttttttcaaaggttcgtcagactcgatttttctatgtacatttgcgtgttataaaagaattattgagaaactatttatggcaaagaagacaacaacaacaaagcaaaatcatacagagccgagctggttcgcagccttgaagactttttttacaaatgaacggacccgtttcattacaggtttgattatctctatactaaccatttacgtagggcttgccttgatttcgtttttctttacaggagccgccgatcaaagtaaaatagagaatgttcctttaggggatttgttgaccaatcgaggatcggtagaaaattggacgggcgtacgcggggcgtatttgtctgatctattgatgaaccgttggtttggcatctcttcttttatgatcctctttttcttgggatcggttggggcgaaactcatgaatttaaataaagtatccttgttgagacgtttcttgttcagtgcttcggtgttgatctggggatctgtgttttttgctttcatatttatcaagggatatgaggatacgtttatttatctaggcggtcaacacggatattacatctcggagatgtttattaccaatatcggaattcccggaacgatcttgcttttattaggctcattcttaatcatcgctatttttaccagtaagaagactattccgttcttgcagcgtatgttctctttaggttgggtgaaaaatcgtttgaaacgtgaaggccgagaagatgaggttgaagtggatcagacggaaaaagaggatattgtaattcctcgctctaagcctgtcgtagagcaaccggatgaacaaccggaaatggatgattacgaagagtttgatacggaggctgaattgttggaggccgaagggaaagaaaaccgtaaaacagaaccggaatatcaggaggaagaggtcgctggtgatgatttagtagttacgatcgctaaaggtgacgacgatcctatatgcgaaaagacagatgagataaataccccggaatcagaggatggggaggatgctggattcacggtggaggttgccgccggtaatgatgaaacctacgatgcttcggccttgggtacgtatgatccccgtttggatctttcccgttatgtatttcctaccttggacttactgaaagcgtatgatagtgggagcatggagatcaatcgggacgaattggcagaaaaccaacgcttgatcaagcaagccttggaagatttcaatatcaagatcgcctcgatcaaggcaacagtcggacctacggttacgctttatgagattgtacccgaggcgggtgtccgtatttctaagatcaagaacttggaggatgatatcgccttgagtttatccgctttgcagatccgtattatcgctccgatgcccggaaagggaacgatcggtatcgaggtgccgaataagaatcctcagacggtatcgatgcaatctgttatcgcttcacgccgattcgttgagggtaagtatgagttgcctgtggcgatgggtaagacgattacgaacgaggtgttcatgttcgatctttgtaagacaccgcatctattggtagccggtgctacggggcaaggtaagtctgtcggtctaaatgcgatcatcacttccttattatataagaagcatccatcggagttgaaattcgtgatggtagacccgaaaatggttgagtttagtatctattccaagatagaacgtcattatctggcgaaacttccgaatgcggagaagccgatcgttacggagccagctgacgctgtcgctacattgaactcgttggtgatcgagatggaagaccggtaccgtttactggtgaatgcgaatgttcgtaatataaaggaatacaacgctaagtttatcgaacggcggttgaacccgcagaagggacatcgcttcttaccctatatcgtggcagtggtggatgagtttgccgacttgatcgcagtggccggacgtgagatcgagttgcctatctctcgtattgcggcgaaggcccgtgcggtaggtatccatatgatcttggctacgcaacgcccggatacaaaggtgattaccggtacgatcaagagtaactttccgagccgtattgcctttaaggttgcttctatgatcgattcacgtacgattctggatgctccgggtgctaaccgtttgatcggacggggtgatatgttgattgttgtagcgggacaagagccggttcgtgtgcaatgcgcttttgtagatacgcccgaggtggaggatatcgtggattatatcggtgagcaggctggcttccaaaccgcttatctgcttccggactatgtaccggaagggggagaggcatcgacttcgggagctgtcgatttatcagatcgagaccccttatttgatgaggcggctcgcttgatcgtgattcagcaacaaggttcaacttctttgatccagcgtaaattcgctatcggttataatcgtgccggacgtttgatggatcaattggaggctgccggtattgttggcccgtttgagggaagtaaggcccgtcaagtattggtgcaagatgagtattcgttggagcaagtattaaatgctttgaaataaatatgagaagagaatataaagtaagagtgtggcggtgtatcgcgtttgtcggattattcttgtgtttcctgctgggactaggagtgggggcgtatgcccagaatgcgaatgatattttggggaaggcggccgctgcttatgagaattcaaatgggataagtgcttcttttacgatgtttacccgttctgccggtcagaatgcgggagagagttttgagggaaccatccagatgaaaggtgataagtttacattagttacgccggaggcgcttacttggtttaatggtacgacgcaatggacgtatgtggaacggaacgatgaggtgaacgtgacgaatcctacgggagaggagttgcaatttacaaatcccgctcttttattaaatagttataagaagggattcacggcggcttataaaggcgagagtacggcaccgaacggaaaagccgcttacgatgtggaattgacaccgaagaaaaaaggggatatcgtgaaagtggagttgcaaatcgagaaatattcaaatttcccggctcgtatcacggttacttctaaaaacggcgttagcagtacgatccagatcagccaattgaaaacaggtataaaccaaccagatcgtttttttgtttttaacgaaggggattatccggacgtagaggtgatagaccttcgataatagagaattgaaaattgataattaatacttagatactatgagcgattcagtgaatgagaaagtacgttgccttattataggctcgggtccagcaggttatacggcagcgatttatgcttcccgtgcaaatttatctccggtgctttatgaaggaatacagccggggggacaattaacgacaactacggaggtggagaatttcccgggatatccggacggtataaccggtcctgagttaatggaagatttaaaaaaacaagccgtccgttttggtgcggatatccgtttcggtatcgctaccgccgctgatttgggtgaggctccttataaaattacgattgatggcgagaaagtgatcgagacggagactttgattatcgctacgggtgcttccgcgaagtatctgggtcttccggatgaacataagtatgcgggtatgggtgtatccgcttgtgctacttgcgatggtttcttctatcgtaaaaagacggtagcggtagtgggtggtggagatacggcctgtgaggaagcgatttacttggctggtttggcgaagcaggtttacttgatcgtgcgtaaaccctatttgcgtgcttcaaaagtaatgcaagaacgtgtcttcaaaactccgaatatcacggtacttttcgagcataataccttaggtttgtttggagagaatggcgtggagggtgctcatttggtaaaacgtatgggagagccggatgaggagaaagtggatatcgccatcgatggtttcttcttggcgattggtcataaacccaattcggacatcttcaagccatgggtagatacggatgaggttggttatatcgtgacggttccgggaactccccgcacgaaagttccgggtgtatttgccgccggagatgtcgctgatccccattatcgtcaagctattaccgctgcgggaagtggttgtaaggcagctattgaggccgaacgttatttatcagagatcggaaaataatccgtgggaggagggtgtgccatatcataaattatgacacactgtcctcttgccttgaaatacaagtttaccatgaatttaaaatctactcttcttttgctactttgcctgatgatggcaggaatggtagcggcaaaggataatacgaaagtgatagcccatcgggggtattggaaaacggagggctctgcccagaactctatccgctctttggaacgtgctagcgaaattggtgcctatggctcggaattcgacgtgcatcttacagcagacaatgtgttggttgtctaccacgataatgatatccaaggaaaacatatccaatcttgtacatacgatgaattgaaggatctacaattgagtaacggcgaaaagctccctactttggaacaatatttgaaacgtgcgaagaaattgaagaatatccggttaatatttgaattgaaatcccatgataccccggaacgtaatcgagatgcggcaaggttatctgtgcaaatggtaaagcgtatgaaattagcgaaacgtacggattacatatcttttaatatggatgcttgtaaagaatttatccgtctatgtccgaaatctgaggtttcttatctgaatggagaattatccccgatggaattgaaagagcttggttttacaggattagactaccattataaagtcttgcaatctcatccggattgggtgaaggattgtaaagtcctaggcatgacttcgaatgtctggaccgtagatgaccctaaattaatggaagagatgatcgatctgggagtcgattttattacgactgatttaccggaagagactcaaaaaatactacattcgcgggctcaataaggcattataaagatgagaaagttttgtctgttgcttatcctgtcgctggctttacccgttttttgtctgttacaagcggtggagcctcccaaaaaggaaattcgtgcggtttggttgactacggtttatggtctggattggcctcataaaccggctactaccgaggcgggacgaaaagcccagcaacaggcattgcttgatatcttggaccggcttcaagaagcgaattttaatatggtcttcattcaggctcgcttgaggggagacgtgatgtatcgttcggctatcgaaccagtcagtaagacattctccggtaagtatggagaattaccgggatatgatccgctcgcttttgtcgttgatgaatgccataaacggggaatggaatgtcatgcgtggttcgtgactttcccgttgggaacggaaaaaagcgtgaaggagcaaggaaagctttccgtggttaaaaagaaaccaaaactctgcaaacggcataatggagagtggtatttggaccccggtgtaccggagaccgctgattatatcttatccttagtcaaggagatcgtgaatggctacgatatagatggcatccattttgattatatccgctatccggaagaggcgaaaaaattcccggataaagcgctgtataataaatccggtaagaaaaagtctctggcagactggcgtagggagaatatcaaccggatggtttatcgtatttacgattgggtaaagcaaacgaaaccttgggtacaggttagcagttcgccactcgggaaatataatcgtattgaacgggtacctaacgcgggttggaccgcttacgaaagtgtcttccaagaccctaagatgtggatgcaacaaggtaaacaagatatgattgttccgatgatgtattacctgcataagaatttctttcctttcgtggataattgggtggataattgtaacgggcgtttggtcgtacccggcttgggagcttatcgaatggacaagagcgaggcggactgggccgtgaatgatataactgaccagatcgattatagtcgttattacggaggagccggctgtgcgttctttcgttgtggaaatgtcctgtataatgataaaggactctataaagagttgagagacaattactataaatatccggcccaattgcctccgttgacttggctgaatgattcggtacctgccgctccagagggcatcaaagtggaacgtttggatgatgagttgcatttaacttggcagaaacctgtgtcggaaaagcaggatttaacttataccgtttattattcattgacggattcgatcgacacagcttcggcaaaatccatattagctacgaatatttatggcaacgagctttttcttcctatcgatgtagagtctgaacgtgggtatacattttctgtaacggcttccacccgttaccggatagagagtgaaccttctccggatacctattattacctgtctaaatttatcaagtaaagggagtattttgatttcgagtttttttgcttatttttgcggcatatgagacgatttgccacatccttgtttcttgtaattcttgcttccttaatcttttatgggggagcgggggttaatttcgtatcttattgttgtggcgtttgcgagaaagagggagtggaggctttattggaagctaagtgctgtgagattcatggacatgatcatagtcgtgataagcttgcgaataatacggtggagtgttgtggcatgaacggctgtggcattgaacgggttgattttgattggaattctgtaaatatacaagtaccggatctgcaaccagtcgtacatgatttgctcttttcctctattttcgagagtttacaaatcgcttccttatttgctgattcttatgagattagggtgacaggtcctcccgtatcctgtcctcgtgtgtacctttctttattgactacgcttttgatttgattgtattcgtgagggtggaagctgctcgctaaataccctttggtttttaaggtaggggatgctctatccctgcggaagcatgtatttaacgattcaatcaaataacaatatcatgttaagacaattatatctgatatttttactgtcctgtttgacttttactttgacttgggccgaggattccggcaagaaagtgaaaggacgtgtatgtgatgaaaacaaacaacctattatcggtgcaaatgtatattgggaaggaacccaaaatggaaccacgtccgatgtggatggaaatttcgagttagaacgaaaaggtgactccaagaatctggtggttagctatatcggttatatgactgaggtcacccctgtggatgagaaggacgatgctatgcagattttcttaaaaggtgagatcgccttggatgaggtcgtggttagtgagcgcaagatgggaaccatcgcttcccgtacgagcgtattgcaaactcagaaaattacgtacgatgagatttgccgtgcggcctgctgtaatctggcggagagctttgagacaaatccgtctgtcgatgtatcgtactcggatgcggctacaggtgcccggcaaattaagctgttgggattggcgggaacctacgtacaaatgttgaccgagaattacccgaatttccggggggccgcttccttatatggcttggattatgttccgggagcttggatggaaagtattcaggtgtctaaaggaacctcttcggttaagaatgggtatgaggcgttggccggacaaatcaacgtggaattcaagaagccccctacggcggatattttctctgctaatgtgttcgctagtgatgccggacgttatgaagggaatgcggatgcttcttggcatatcaacgacaagctctctaccggtttattggtacactactcgaatgataaaatgcaacatgacggtaatgacgatggttttctcgatacgccgctaagggaacaggtgaacgtaatgaatcgttggtatcataaattggataaatacgtggctcaatacggagttcgctatctgcatgagagccgtaccggtgggcaggatacgaaacaccatgatttcaccgacccgtatcggattcatttaaatacgaaccgggccgaattatttacgaagcaggcctatattatcgataaggaaaaggtagagagcgtggcattgatactttccggttcttatcatgagcaaaaatcaagatatgaccgtacgccctataatgtatatcagaataatgtatatgccagtttgctgtatgaaaaggagtttacgccgatgcatagcttgagtaccggattaagtatgaactatgatggtttcgacgagaatctggttcaatatgcgggaggagagtcggtccgtcatgcctatgaccgtacggaagtcgtgccgggagcttatgcccaatatacgttcaatctgaatgataaactgatcttattggcgggtgtacgtgcggattatagtacgttgtatgatttctttgtaacccctcgtgtacatattaaatataatccttttgactggttccatatccgggcttcggcaggtaaaggatttcggacagcgaatgtgctggcagagaacaactttttgttatccagtagtcgaaaaatgtatatcgccgacaatctggatcaagaagaagcgtggaataccggtctgaatctgtcattttatatacctttgttcgggaaggaactgagcttgagcggggaatggtattataccgatttcttgaagcaaatcgtggtggatatggatagtgatcctcatgcggttcgtttctacaatctggatgggcgttcctattcgaatagcttccaagtggaggcttcctatccttttttccggggatttacgttaacggccgcttatcgttatacagatgcgaagaccgattaccggaatgaggagggggtggcgcatcgattgaaaaagccgttggttagtgattataaaggtttattgaccgcttcttatcaaaccccgttgaaaaaatggcagtttgatttgaccagccagtttaatggaggtggccgtatgccgacaccggatgcatctaatccgttatgggagccgaattttaaggcttatacggtagtgaatgcgcagattacgaaatatttccgtcaatggtctatttacgtgggagcggagaacctgtttaattacaaacaaccgaatccgattatcgatgccagcaatcccagaggggataacttcgatggatctatggtgtggggaccggtgcatggacggaaaatttatgcgggtatccgctttaatataagcagggattgacacgtatatacgtataagcccgcacgtatatacgtgtaggcctatgcgtatactggtgtggccctacgcctatatacgtgtagcccgatgcctatagtggtgcttttcttttggtagatatgaatggataattagaattgttaatattaaaaatgattgattatgaaacgattaattatgttgctgttttgtgctgtatgtacggtatcgatgacattcgcccaagacgcgaaaaagaagaaggactctgtgacattctttatcgaagcgatggattgtgatcactgtatcaagaagatcgagaaaaatatcgctttcgagaaaggagtgaccgacttgaaatgtgatctgagcacccgtacggccattgtgacttacaagacggataagacttcgaagacccgcttggccgcggcattcaaaaagatcggtatggaagcggttccggtagataatggcgccggttgtccggtacctccggtgaaaaaaagtgagcatactcacgctcattaacatggaaattcataagaacatcttatctttgcagatgttccgtgagggcgggccggagtgtccgccctgtttatgaaataatttttctacggaatgcagcgtttgtttaattatttacatcctaatattgtacagtctccagaagggagacgttcaaggcacgactgaatgaatgagctacaactgatagagggttgtcggaagggggagagacgagctcaaaaagagctttatgatgcatattcccgaaaaatgatgggagtttgccttcgttatgtgaacgacagggaaacggctcgtgatttgttgcaggatggcttcgtgaaaatctttaccagtatggattcctatacagggagtggttcatttgaggggtggatgcggaagatctttgttaattgtgcgttggaatatctgcgaaagtcggatgtgttgcgtgaagcgaccgatcttgacaatacggcggaactgattcaacccgatagttcggctatctcggacatgtcggcggctgaattgatgaatctagtgaaggagttgccggttggcttccgtaccgtattcaatatgttcgcgatagagggatattctcataaggagatcagtgagatgttgaacataacagagagtacttcccgttcacaatatacccgtgccaagcagttattacaacgtagaattaacgcattgtattgagataagatgagtaaaaaggaaagagatatatgggatgatgcgatccggtcgaagctagaggatttcgagatggatacgctacccggcgactgggaggctatagccgatcgattgcccggaaaggctccggttcctttgcgtcgtacgcttcgctactgggttgccgccgccgtgatctccttattggtcgtatcgggtggtatctatttatatgacagggagatggaagatctacctatagcccaagaaatacagtcttcacaagagtcgacatccgtggataccccggttgttccgatagagaaaacgatggagcaagcgcccgtattagcaactattcctgctgctgcggtcgtgaaggcaaaagcggcatctggagcggttaaagtggaagataaggctaggatggcagtgttccggcaaaatgtagagagtgcaggggatcggcctatttctgagtcggaggtaatgtctgctgatagatcggcgaatgagaaagataccgttgaaccggaggttgaaaggaataatgatgagatagttgttctcaagaatgatgtacttgtcgcagatgctactcctgttactaaaaagaagccggagaagaccgcgtctcggaaatgggggttcggtatgggaggtggaggtctttccatgggcgctgataatctggtccctcagtatgtgacgaatagcagtgtgcttaagagcgagaatctgatgagcttaaattcgttcgatgcggagaagaaagatcctgctaagacggatattcatcataagacgcctattggggtggggatctcaattagtcgttatttgaataatcgtttttctttgcagactggattaacttattcttacttaagatcggagtggagtacgaataatacgtatcatatagagaatgatcagcgattgcattttataggaattccattatcattgacttataagatcgcggaatggaatcgttttatgttttacgcctcagccggaggtatggcggaagtgaatgtcgctggcaaacgtagaatgaaattattctcggatgaggtagagatcgcaaagcaaagcgaacatattcgaatgaaagaatggctatggtctgtaaatgcccgtgcgggtgtaagttatccgattatccgttttgtaagcgctttcgctgaggtgggagccagctattattttgataatggtagcgagatcgaaaccatccattcggagaagccgtttaacatgagtcttcagttcggatttcgttttggtttttaatactcgatagattaacagtgtaaatacaaatacttaaaaatagaaaaattgaattatgaaagcatttaaattaattggagcagcggtggctgcgtcattattgttgttgacctcttgtcttggagaatcgaataatacggtgactcgtgccggctttggtgtcgcaggtctttctgaaaagacatataaaacggtactgaatacaaatatgggagcattatactctccgtctttatcggcacaagtagttgacggagcttgttacttgatcaactatgaattagacctaaattctccggagaatgcgaatgcggcgacaaatggttatttaacagcgacaatctctgtggcagatgagataacaaaaggacagccagtcttttataatgtgccagattcggccagcttacttcagaatgagatacctgtaaaaaacctatttagcaatggcgactatggggtgtatgtagacggttatttattcttctttataacaatggatatgtttaaggatcagaaaaattcttatactttatattgggatcgttcaaaggagcctactatggtggataatgtcccgacatatgacttgttcttgcgtgtcgctaaagtagcggacggaacaggttctgcggcatcatctataggagaagtccgtgcgtttaatgttaagtctgtattggagtctgtgaatagcgctgaggctaataaagattcaaagtcttttaatcttaaggtcaattatctaaatacgattaatgaaaaagatagtacggatttgaaatgggcttcttataccgttctattccaagtcgtgaaaaactcataaagaaattagtatagaagttgagggcgtaccgataagaagattatcgatacgccctatttttttgccgttttttttatgtatatgggtaaagatcgtatctttgcgtactttaagaggagtattgtgaaatgagatacaagaatttaataggttttgtctgggtggcggttttcatgagtctgtttacttcttgcctaaaggacataaataacgtctataatccgggaacgaccgccgctgtggttcgtcaacatggagatagcgcgttgatgatggctaatacccggttcggttggatctattcgacgaagctgagctcatactcagagggtaaatgcttgttggtgagctttgattatgatcctagcttaccggaaaatacgaatgcggaacaaaaagggtattatacggtgacgatacaaggggaaaccgctgttaaccagcaaaacgctgagagccctcttacggatacgcataaattattgactaatgagcaaccggtacttgcggtcaaccccaatgattctgttttatacatcgaattagaagactatttatttctgccctctgcttgttggacgacaaaagatcggactttaaattggcaattgacttacgatccggctcaggaagctgttgtggaaaatcgaaaatctatatattccttatatttacgggctgccgctacgaccggaaagccggaggacaaggcagaagaggctatcgcggttatcaatgcctttaatctggggaactttatcaaagatatgcgagaacaaggtggacgtgatgcggatatgtatgttcggattcattatatcgatcaaattaatccgaaagatagtacccagtttacatggggagtaacagatcctttacttataaactaaagaagatgagaaagcgaattttatacggcttatttttatccttgtttttcttaatgacctcttgtatgggggatggaagtaattccatcaattatcatcgagtaggagtgatacgtgagaatcctatgcgatgtatttacacggcggatgatcaaggggagatctttatcgtctcttcctctgagtttgagaatcggacggatttgaaagatggcgattgctgtgtggttgatttcaagacgaattttagcgaggaattgggcaatggtgtttacaacgctgagatttataagtatgattcggtcgctgtatggcctttgcatgagacattgactgatactacggttgtattggacaaggagcgtctggttacgctggactttaagaaaagtatttatttggaaggacgtttcttcttgcaaacccaacatgtaaatcatcaggtagaccaaaaggatattttcaatttatcctataaccctgatcaggaggtggaagaagacagcaccggacaacgggtctataacctataccttcgggtaacccaagagggaggtaccggcgattccacgaaatgggtgaatacgaccgcttttacgatcgataagtttttggaccaagccaaagcgatagagagtagtgaggggcaaaatgtgataaattttaaaataaattatgccgaacgctataatgcggatacaaccgcatgtgtttggggggctaccgacgtatttacgttgcgttttacgaattaaatatatacttttgctatttaaaagtaaacagagatgtataaggagatatttaggtgggtaatcgctatcatctcacagccggcgaaggcgtgggccttgttagcgaaaaaaggagagaagcaggaggagttcttatcccgattcgtgtatcctttgatcggcttcgttaccgtcgcagcttttctgggcgtattgtttacgcggaaggagtttgatttagagctggccttgaagtcgtctatccggacattggtgtcctcgttcggtggtttttacctcggggcttatctgatgaacgagatatggcaaggtatatttaaacgggagaaggatttgaaactgtggttgcgcttcgtcgggtattcctcatcgttgatgttcgctttgaatatcgtattgatgttgcttcccgagtttttcttcttgcggatatttatcctttatacattctatattgtttgggaaggcgctggtccgtatatgggagtcgaggagaagatccgtctgaagttcgtaggatttacaaccgccattatattactgactccggcagttatcgagattttgttatcgatgctgatgcccggtttgagtttttgacagaataacacaagatgaaagagaagattagtaataacatacagataaagaataagcgggcgacgttcgattacgagttgctcgacacttttacggccgggatcgtactgaccggaacggagattaaatcgatccgtttagggaaggcgagtttggtagatacgttttgtatcgtggaaaaaggggaactgtgggtgaagaatatgtacatcgccgaatatttttacggtacgtacaataatcacaacgcacggcgggaccggaaattacttcttaccaaaaaggaattacgaaagatcgagggtgcggttcgtgctagtggttttacgatcgttcccactcgtttgtttatcaatgagaaaggattggcgaaagtagtcgtcgcgatcgcacgaggtaaaaaggaatatgataagcgagactccatccgggaacgtgacgaccgacgggagatggatcgggctttcaaacgataagtcgagatggaaacagggcaaggcgtgatcggtagggtttggggatgtatcctgaaagctctgcctaaagcaggcaagacgtgtttatggctgctaaagattattttgcctatttctttattggtccgtatattgcaatattccggaatattaggtcagatctcggattggttagtgcccgtgttctcgttggtgggtctgccgggggagacagccattgtttttataaccagtatattctccccattatatgctccgatcgctttgatcacctcgatgtctttaggagtccgtgaagctacgatattggcattgatgtgccttacttcccataatctaatggtagaatcctccgtacaggcaaagaccgggtcttctttctgggagatgacgctgctccgtttgatcatgagtttcgtgatcgccttttctttgaattgggtaatgccccatgaaggatggggacaggtcgggatcgctcaaagcgcggctgtatgcgataattggttggaagtattcgtactttggtttaccagctcgatgaaggtggtgatttctattttgataattgttacggctttaatgatccttcattatatattggaagagtttaatctaatgaaaggattgtcctcggtcttttctccgctgatgcgattatttggcttgcctcaagatgccgcttttttgtggttggtaggtaatgtggtcggactggcttatggcggggctattatggtagagcaaatggagcagaggaagttgtcttacggtgacggcaacttgctgaaccatcatttggccgtgtgccattccctgttggaagatacgatcatctttgccgcgataggggtacccgttctttgggtggtgcctacccgtctgtttttcgccatcgctgtggtatggatcctccggggatatagttatatgtacgcaagaaaggtaaaacatatttatgaataaggaacgatttctgcgactcttgaatgagcgcattttgatcttggatggtggtatgggtaccatgatccaaagtttcaaactaaacgaacaagattaccgaggcgaacgtttcgccgattttccgggacaattgaaggggaacaatgatttattgtgtatcacccgcccggatgtaatccagtctattcatcgtcagtatttggatgcgggagcggatatcttcgctacgaatacgtttaacgcgaatgctatttccatggcagattatgcgatggaggcctatgtacgtgagataaatctggccgccggccgattgtcgagggaagtggcggatacctatatggcagagcatccggatcgtacgatcttcgtggccggatcgatcggtcctactaataagacagcttccatgagtccggatgtaagcgatcccgcttatcgtgccgtcacttataaagatttgtataatgcctacaaggagcaagtcgagggacttgttgacggcggggtggatatcatccttttcgagactactttcgatacgttgaacgtaaaagcgggattggaagcagctgaggtcgtgttgaaagagaaagaaaaagacctgccgattatgttgtctttgactttgtccgcgcaaggtggacgaacattttccggacagactttattggccttcttagcttccatacagcatacacatattgtttcggttggcttaaactgctctttcggagcagcggatatgaagccctatttacaagagttggcgaagtatgccccctattatatcagcgcttatccgaacgccggattgccgaatagttttggtacctatgacgagacgccggataaaatggcccaacatgtgaagccttttgtggaagagggattagtgaacattatcggaggctgttgcggaacgactccagcgcatatctcccggtatccggagttggtgaaaggagctaaaccgcatatcccggctttgaaaccggattgcctgtggctgtcgggcttggaactgctggaggtgaaaccggagaataatttcgtgaacgtgggagagcgttgtaatgtggccggttctcggaaattcttacgcttgataaaagaaggcagttatgaggaagcgttgacgatcgctcgtaagcaagtggaggatggcgcccaagtgatcgatatcaatatggacgatggtatgttggatgccgtgaaagaaatgaagacattcttaaacttgatcgcctccgaaccggatattgcccgtgtacccgtcatgatcgattcttctaaatgggaagtgatcgaggaaggcttgatgtgcgtgcaaggaaagagcatcgtgaattccatctccttgaaagaaggagaggaggtcttccttaaacatgccgcccgtattaagcaactgggtgcggctgcggtcgtgatggctttcgacgagaaggggcaggcggatacctatgaaagaaagattgagatttgtgaacgggcctatcgcctattgatcgagaagatcgatttcaatccccaagatattatttttgacccgaacgtattggcgatcgctaccggtatggaggaacataatggctatggtctggcgtttatccgtgccgttgaatggatcaagaagaacttgccgggtgcgaaggtgagtggtggtgtaagtaatttatctttctctttccgggggaacaatcatgtacgcgaggctatgcattccgtatttctatatcatgcgatcgggaaggggatggatatgggtatcgtgaatccgtctacctccgtactttatgaggatatagagccggagttccgtaccttgttggaagacgtgatcttggcacgccgtccggaagctgccgaggaattaattacttatgctcaaaatttacatgttcaagcttccggagaaactccggagaagcatgaggcttggcgtgagctttcattgaaggagcgtttggagcatgccttaatcaaagggatcggagactatttggaggatgatttacaagaagccttgcggacttattcgcatgccgtggatataattgacggtccgttaatgagcggaatgaataaggtcggcgagttattcggtgccggaaagatgtttctccctcaagtcgtgaagaccgcacgtacgatgaaaaaggccgtagctattttacaaccggccattgaatctgaaaagaaagcttccggctctgcgaaggccggtaaagtgattttcgctacggtaaaaggggatgtacatgatatcggtaagaatatcgtctctatcgtattgtcttgtaataactacgaggtgattgatttaggggtaatggttcccgcagatgtgatcataaagaaagcgatcgaggagaaaccggatctggtttgcttatccggcctgataaccccttctttagaagagatggcgcatgttgcggacgagatgcagaaagcgggacttacgattcctatgatggtgggtggcgctacgacctccaaattgcatacggcggtgaagatcgctccgcattatgattatccggtgattcatgtgctggatgcctcacagaatccgttgatcgccgccaaactattgaatccagatacccgtgacgcttatatcagggagttggaacaagaacaagaagccttgcgtgcctctttagggcagaagaaagagaccttggcttctctttcagaggctcgtaagcatccgatagaaatagattggaccgggtatacaccggttgttccggcccggatgggggtacatgttatcccttatatccccttggaagaagtgattccttatatccactggaccttcttttttagcgcatggaaattgaatggccgtttctcggaaatctcccagatacatggttgcgattcttgtcgtgcctcttggttggccggattcccggaaaaagatcgtgcgaaggctaccgaggcgatgcaattatacaaggatgctgttaggttattggatcggctggtcaatatgaaggttgaatattgtaaagcgatttacggatttttctcagcgaatagtgaaggggatacgatccgaatgggtgatatagcactgcctttattacgtcagcaagtaaaaaaagaggaaaatatttataaatgtctttccgattatgtaataccggtttccgaggagcgaactgattatgtaggggcgtttgtcgttaccgctggagctggcgctgattgtttgaaggataaatttgaggaagaaggcgatacctataattcaatgttgctgcaaaccttgaccgatcgcctagcggaagctacagccgaatatctccatgagaaagtacgtaaagaatattggggatatgctaaagacgaatccttgtctatcccggatctttacaaggtgaaataccaaggaatccgtccggctatcggttacccttctcttccggatcaattattgaatttcacattggatggattgctcgatatgtcgcgaattggtgtttcgttaaccgagaatggtgccatgtatcctacggcttcggttagtgggatttatattgcccatccctcttctcaatatttcatgatcggttctatcgatgaggagcagatgagagattatgcgagccgccggaatttaacggaggaacaagcccgaaagttgttgagtaagaatataggataatttattaacatcactgcaactcgggttgcagtgatgctgcaatgcctgtgcagtaatactgcaacacctattgcagtaacactgcataggtattgcagtaaaaaacaatcaatacgatctatctgccatagtaatgcttggcggaaggaaccatgataacgttcaattccggatcagccatatctggatcgatcgggaacatcggtctcacgatattcttatagggaagtttcttgaagtcctgatccacgcctccccttgtaaaagccatcacccaatccgcttgtatattgtaccattgggttacaaggtaaccttgtttaaccattacgatatccatttccttcggatcgatacctgaaccctctaggtttggagtgggagacgatgtgcctactaccacataaacgcttccggtctttacgatagcgatatcccttttccgtctccatgattccgcgttcttgtcttcttccgggctgacataaaccacggtacccgacaatttcacgggaccttcgtaggaattatcgaccatggcacctaccatgccttctacgtgtccgcctacgccgaccttacgtgcctgcttaaccacttcttctcccgggatggagcaataaagaacgctctttcccttatcggtctggaattccgggcgtttcaagagcctcgccaaagtccaagtgacctcacctgaaccacctccaccgggattatctcccatatcactgataaagaaaggcttctttttacttgctactgccaaatcgatacatttctcgagcgaatatcccggagcttccagcgagaactgcttacggacatcccagaatttctgggcgagtttcttcgccccggctttaacctgttcctcatcgtcaccgtaaaccatcacggttccttggttccgtgggttgtctccccaaacataaccgatccagatccctgcgtctatcactccgggcatggcttcaacctcgggaaccaatgcgtacagcgatttcgcaggctcgacacgggtactcgaccattcgccggatactaggacaggaacagcaacccatgccttgtatgccggacgtcctttccccgactcaagacgttccaacaaattgacgacccctcgccgatgcgattcgcgagaatccgcatgcggtgcttgacgataagtcgtaatcaaatcggagttgagagctaccaaccaagacgtatttccgtgaaggtccatcgtggtggtagtcaagacatcgtttccgatcaagctacgcaccttctccatgaattcgccctcgggatcggctacgccttccacgctacaagctccgtggttataaaaccagaaggcgtcatatggcatattggccttgatcatctccaatgttttttccacaaacgcatcgtacgattcttttgttacggggcctcttccaccgccatagccaatctgcgtgggaagccaagtggccgcctgtcccattgcggagtctgggctgagatagtctggcattcttacggggtgtcctacgagcggttgcctattcgggacgaacacgctgttttctatctgtataccggcaataccgatacgaggttttttcttctgtccaaaggcctctccaacgaacgatacggccaagagacagattccgagcaatactaaattcctattcatactattatgatttttgcgaattgttatttccttattaattagttattaaaccatcactaatatcaatctcggtttgaggtataggcaatacttccgcaccggcgctgaaaggagtcttagctccaaattccgccttcttggttccgttaaagactttctcgccccatcctacacgtaccacgtcaaagaaccggaaaccttccattccgaactccagatgacgctcattcatgatgtcttcaaacaattggcttcctgtatggttcttaggagccaagttgacatgacttcttacctcattcagatacttttgcgcattagcaatatcgccgctgaaataacaagcctcggcatagttcaaatatacctccgcgaggcggataagcctgaggttcgtgggttgattatttccccgattctcctctctttgcccgggcgcgagatatagtttgcgattgtaccaaccggttcggtcgtccgtaacgggtgccacatcgcctttggccgcggtctcgatctctatagcctcttccgtggaaaggagagtggtcttctttcgtatgacatccccctcagcatcataagcgtccgccaaggcctgtgtaggttgcgcgcaaccgaagccgatcgtcatgtttcggggcatagacatcagcacgtgacggttaccgttatttacattatacgaactttgggtggaagagacatacatattcacttctagaatagaagaggagcagtgctcgccgtccagtgagaactgccaagcgtaatcctccggagcgaccaagctatactcacccccgcactcattctggaatttctcgaaagccttttttacctcatcgtattttttctcatacagataaatacgtgtttgcatggcgatggccgcgcctttggtaatccttcccgcatagcttgactcgtagttagccacctcacttttcttaggtaatacgctaaccgcatcgtttaggtcttgctcgataaccgagtatatctcttcgacagacgcacgtccgagtctctcatgatcgagatccaagactcccgtatagcaaggaacaccaccaaaggttttcacaagctcgaaataagtataggcgcgaataaacttggcctcaccgatcatctgttccctgttatatttcgagaatagggcatcgtctgccatttccatatcccgtataaacaaattggccttattaatacattggtaagaataccgatatttgttcaagatctcggtatgatccgcttgatactgataattctccagcaacgtgaaggtttgtgcgtcgttcgaagaaccgctgtaggtcgcgtcattcgacaacacgtcgccgaaacattgcattgaccatgtgtaacggaagtccttcatgacggaatagacagcggtcagacgcaagaaagcttgtctttcctctgatatctctccagcctccggacttcctaacggagctaaatccaaatctgcgcaactgctgaatcctgttaaaatcgctagtacgattcctatgatatatttgtttttaaacatgacattataaattttaaaaagtaacattaatacctccggtgaatgaaatgttctgaggatagataccgtaatctatacctctagacaaagagctggactgacccacttccggatccatacccgagtaactggatatcgtaaacaagttctggccgcttacataaaaacgtactttttgtagttttatcctctgcgtgagagaagcgggcagggtataacctagctgggcgtttctcaagcggaaataagtcccgttttctacgtacatgtccgagaagcggtcattgtcgtttacgtccgtagccgtcaggcgagggatgtccgtatttgtattatttggcgtccaatagttcattaacgctctatccttgttcgttatatcgttcgggaagtaggtgtaataacgcatcgcgttaaatatctgattaccgattgttccaccaaactgcaaattgaggtcgaagcctttccacgccatacccatgttgataccgtatatgatatccggaataggattaccgatcatgcatctatcacttgagtctaacttgccatcgccgttcgtatctacgaacaatacatcgcccaattcggcattaggttggaaatccgcccgcttaacggcattcaactgttcctgtgtttggataagcccgtctgtcttatagccccagaacgcaccgataggcataccttcattcgtataggtgaggtacatgcttccgtttcggaatggtccatcggagattggtgtgccaccattcaatttcgtcatgcggttacggatggtcgacatatttactcccacgttgtattcgaaaccgctttcggtcttgtctctccactcgagattcatctcgataccgcggttgttcgcctcgccgatattggtgtaggtgttgctggcatatcccatgtagataggcataggagcggccagcagcatgtccttcgttgtcttgtaataatactcgaagctgaagaccatgcgggtgttaaagaagcttgcgtcaagaccgatattcagagattcagtggtttcccatttaatatccggattgcccaatctgctcacggcaataccttgatacaaggtctcattctctctcgctccgaataaagcgccgtattgcgtactcaatgacagcaaactacgatccacataattggtgatattctgatttccgatctgtccccagcccccgcggagtttcaaggaggaaacccattcggcgttcaatttctggaagaacggttcgttgtcgattctccaacctagagcgaacgaggggaagttaccccagcgattcttggaagagaatttagaggagccgtctcgccggaaagtggccgtaataaggtatttgttattgtaatcgtagtgtaggcggcccagataagacatcaaaccatattccgtagcgctattgctggccgtggtcttgttcttgtccagcgtagcgtctatataatgcaggttatccgactctccgataagatctctcgcgtttacgctcaaggtttcctgcttaccccattcgttggtataacctacgagagcggatatggagtgcttctcggcaaacgttttctcatacgaaagggtattctcgaacgtatagtagtgccctttggtctgcgacttcgataaactactctctaaatttctttggcttgaggatacttcatagacaggcgagaaggttttattgtctacccttctgatttccgctccgaagctactcttgaacttcaatccttttataatctgccattccccatacatattgccgatgaaagcaagtttctcccgctgattatcccgatacatgatacttgccaatgggttatagtagtcaatataaggagagtaaccatatgaaccgtctgcgttttgggcgggagttaccggatccaaacggattgcgttacttacgacaccatagtcggagtcgtacacattactactgttgcgctcactaatacttgcgtcggtagatctcgcgatcgacgcgttggtacccactaccaaatgatctttgagcaccgttttttccgtgctttgacggacactgaaccgttcgtagttggatttcttgatcgttccatcttggttgatatagttcaagcccagattgaatttatagtcgttctctttaccaccgcttatgccgacactgtagttatgcataaaggccgtatgcgtaatctcgtccatccaattggtggaaacattacgattaacaagggccaagttgatgggaacgctcctcactgtgttcaactgttcctgatagtcgtaccattctggacctgacatcaaatcgagattattcaatattttgttcataccccaatacgcatcgagcgtaacggtggtttttccagcggcgccttttttcgtagtgataaggattacgccgttcgcaccacgggaaccgtagatagcggaagcggaagcgtctttaagcacctccatagactgtatatccgatgtgttcaggtagtttatatccgtcacgggcatcccgtccacgacgaacaatggttccgcgtcgtttaccgtaccgacacctctgatacggatcgtggcggcggaacccggagatccggaactggaagtgacggatacaccggtagccaagccttgcaatgcggtagaaacattggccactgcttggcgagcgattttctcctcgctcacggacgagatagcccccgtgatatcacttttcttcatcgtaccgtagccaatcactaccacctcatccaacttttgtgtgtcctcttgcaaggagatgcttaaaaccgatttattgcctaccggaatctcctggttcatataaccgatataggacacttgcaaaatagcgtctttggctacttccaacgtgaattttccatctatatccgttattgtcccgtttgttgtcccttttaccatcacattggcgccaattattggcataccggtagcatcaatcacggttccggtgatctgacgggtgttttgttgcggggtggatacgattgatggtttctctataatcatgatgtcgcttttaatgcgcatgtttggggagtgtacggaagcgtatacacctgtggtaaaaacaaatagcgggattgaggttaacttcatgactctgcccaatttagtttttgtgtttaatcgggggttaggattccccttacaaatttcattcatacatttgtaatgttttagtgttagtattaattgatttaaaggcgtttagaaacttgtttggctggattataagccatatcttccagccagtttccttgctagatatggttcatgatggctcctgtttcataggctctcctttctttaagattaactttagtaaactgaatatgtttatttggttgtttgatttgcaatattcgtgaaaaaaaacgacacctgcaagcaagtctctgctaatttaatattgtgtattcaattgatagaagtcattaatacggcttaattatgtcaatttgtcatttctctctccttctgcttcttgtatttgagataggatagggtgtgtgtttattatatgcgattctctggtagttaagccctgacgaatagaatgtgtatgaaggaaaatacttgcagtttgccttctttttatcaatatccgccgaattattatatctcttgtttcagaaaactaataaatgcttcctgaatagtatttgaaaatcaattgactttttttcgttctagggtgcaaaggctctaatatagtctcgattttcagtgtacagaagattatgattaaaagtagatcccaactaaattagagcaagtgccggataattcgaactaggtgccgggtagatgtcggttatctgccgggaaatagaaattataagccgactaaatacatacaagtttaggatatatcctaaaaaatgtgctgttttgggtactaaattccataataatcggtttaaaagcaattgttttgaaaaagtctgtgtttgaaatatatttaaaaagttaacattatgatagtgtttcggtaattctttttgcattcagatagtatggttatatttgtctattcatttcaaatattattaaaaaacagagagatatggatgagaaaggattcgtggaaggggtgagaaggtatatgtcccagttacgagaggaaaagcgttattcctccgccaaaagttatcaggatgcgttgaactcctttataaagtatagtggaacagagaacatttcctattcggatatcaataaggccaatcttcaccgatatgaggcttatttgttggaaaacgattgcatgcgtaatacggtctccacgtatatccgccgtttgcgttgtatttataacaaggcggtggagaatggtgatgcggaatatatccccggtttgttccaaggagtttttacgggagtggagagtaagcgcaagaaatccctatccttagagaaccaacataagttgatgacggtgaaggtagagagtgaggtgctaagggagacacaactggtcgtttgtttgttgtttcagtatgcaggaatgtcgttcgtggacttcgcccacctaaaagaaaggaatatcaaaaacgggatattggactataatcggcagaagacaggcacaccgatgagactggaaatcttggatacggcagaattgatgcgcaaggaattaatgggtgacaagaagccggcctcaggctatttattcccttttttgagtggaacgaagacgggctatgaggcatatctcgaatacaatgcggccctatctcggttcaatcgaaatttgaaggcgttgaaaaaggccgctggaatagcatcggatgttacctcttatacgatccgccattcctttgccatggcattgaaagagcaaaatgtccctatagaaatgatcagtgaattattggggcataagtccatcaagaccacccagatttatctgagaagtttctctttagaaaaaatgacagaggtgaatagcacttgctttggttgtgtctataattatgtgtcgaaagtgggatgaggctacttagtgagtagcgtttgtttcacgccgcaaatgtagtaaaaaataacaaaaaacaagcaatcattagggtttgtttgtgtttccagttggattctcgttaaatcttcgttcttatttctgatgtatagacatggcaatagagacgaaatggcctcgtatttccgaaatcatcacgtccccccctaaaatcgaacatacattcttgtagagatgggtataccccgtctcatcccctctaaaagatgttttaaattactgtcagacggtgggagacggagcatgctccgtctctacaactgagtaataaccattctcccaccttttgcgctactcactaagtagcctaatttctcacatggcgaaaaagggttatggtgcatatatcaaactatctcttttaagcaatcaacgaaatgcgagcgaatgttgtaaaaacggttgtaaattcggtacctcatgagggtatcgacgccgtaggcgttgaaagaaccattcctgaaaacccgttacggcgaaaatctgatcagaaacattggtacatcgctatcgtcaacaacaagtccgagaaactatgccgtgacaagctggaaaagcgcatagccagtcagccggaaggcgagaaggactatgaggtttatatagcctcccaaaaagagatgtgtcttctgccaagcggcaagcgtaagcaagtagaccggatcgtcttccgttccattgtattcatccgttgcaccgatgtcttgcgtaggaaggagatcgtgcatcttccttatatcaaacgtttcatggtaaacatagctggcgaacggtctggaggcatacgccccgtagccttcattccggatgagcagatggtgaaactccgtagaatgctggacgattccgaagagcctgtcattatcgatccccgtccgctgcctcttggagcgagggtacgtattaacggcggtaagttgcatggtctagaaggtaacgtgctggaagtggaggatggcaatcttaactttgtgatccgtgtagatctactgggatgtgccaaagtaaatatcacccgtgacctgctagagctattatgatacacatagatggatacgcactacggtaaaaaagaggatagatccggagtacgccttatctcgttgttaggaaaccatttgaaagagattcttaagcgagagtcggataatcgtgccttcatccatctttactgtacgggtccgtattgggtggcgttcgagaaatcagcttacctgttacgccaaatatcttcccgtaccttagtgaccccgttaagcctcaccacgtacccgtttccaatcgtgatggtctcttggacagatggcgagttacgttcctatacacgtaaccatcttttccattgcgaaggcaatgactacggtcggttatccgtccctactcgtacgcttgacggttacaaggagtggcataaggaagaggtgaggtattttccgatgccggaagtaaaaaccacgtccatggatcgtgacatggagattgattaaagatacttctgaggttcaagagagcctccaatcaagaatatattatcgctaggtcgcaattagaaaatgagaattaggcggccgatatcgatcaagaggtcagctatctctagtagcgaggagagtccctttttctttaaccgatagactagactcttgctttagcttataccactccaaccacttgagaggttcggtcgcttattattatagttagatagatatgaataaaacaaatatggaaaaggtgaaatatcgttataatcgctggcgtttagcgctggggcgtctggtaaatttgcggtatatcaaccgctggatcattttttgtgcggatcttttcatttccctatgtgtatctttgataggagtgctgggattattgtccatcatgcatgtatacataagcgggattagtgtattaaaggtaggaatagcttcctttgtggccagtatcctttcttttcttacgttcaaggtttatcacggggtgatccgtcattccacgctacgtggactatggaggattggtggtgtcgccatcacaaaatccatcctcatgtttatactgcttcatcttttgagggcggatttcaattcctctatatattgggtgggagggataaccgattgtatgttgacgattgttctgctgatcaccttacgtgtattcgtgattaatgtatataatagcgtgttgtcccaacttggaaaaaagcgcaagcgtgtactggtgttcggtatggatgaggatagcgtgatgatagccacatcacccaaccggcaagtattcatgcaaaattatagcatcatcggcttcttgacgtttggtagcgctaaaaagaaccttcgcatagcggaacttcccgtttaccagatcgaggacattgatgacttgttgcgtctgatccccagaaataacttggatggtatccttttcccgaatataaagaccgtccgacgagaacgtgatcgtttgattcattattgcgagcaggcctccttgaagcctctcgtggttcctgatatggaggaggtccatgagggcggaatgaagcgttcagtccgtgagatccgtattgaggacttgctgggtcgtgaggagattagtataaatctgggcgagatcggtctcttattgaaagataagacgatccttgttacgggagcggccggtagcattggtagcgagatctgccgccagctggcgcatttcccgatcaagaaactgatctgccttgatgccgccgagactccgatgcatgacttacgcctggaattggaggagaagtataaggaactggattttgtacctatcataggcgatgtccggaatccggaccgtgtagattacgtattccgcaattggcatccccaggtagtattccatgcggcagcttataagcacgtccccttgatggaagagaacccttgcgaggctgttcgtaccaacgtgtttggtacccgagtgatagcggatgccgccgtaagctatggtgtagagaaattcgtgatgatcagtacggataaggccgttaatccaacgaatatcatgggatgtagcaagcgcctcgctgagatatatgtgcagagcttgagtgtggcgatcagtaagggggctctagcgggaaacactaagtttatcacgacccgtttcggtaatgtattaggaagtaatggctccgtgatacctcgttttcgcgatcagatcgccaaaggaggcccagttacggtaacccatcccgatatcatccgctacttcatgacaatccccgaagcctgccgtttggtgttggaagccggtacgatgggcaagggcggcgagatattcatctttgatatgggtgagccggtcaagatcgctgacttagcgaagcgtatgatcgagctttctggtttgcaggtggataaagacatagagattaaatacacaggtcttcgtcccggtgagaaattatatgaggaactattgagcaacaaggagaatacgaaggaaacccctcatgagaagattcgtgtggcagcagtccgggagtacgcctacaaggatgtggtagagcacattgatctattagctgaattatcccttcatgtacatattcttcctatggtgaaagagatgaaatccttcgtccccgagttcaagagccaaaactctcaattcacgagattggacggagtgaattagcaatttagttggtagttataaatctgaattataaatgattatcgcagtagattttgacggaacaatcgttgagcataaatatccggcgatagggaaggagatccctttcgctttcgagacattgagaaagttacaaacagaacaccacaagctgatcttatggagtgtgcgagagggcaagcttttggatgaggctgtcaccttttgccgagagcggggcttggagttttacgccgtgaaccgagattatccggaagaagagaaaaacctgaacaaccatttctcccgtaagctgaaggccgatatttttattgatgaccgtaatcttggtggtctcccggactggggtatgatttacgagatggtgagtaaaagactttcctatgaggatttaatgcggaaatacgagtcggaatacgaaccggagaaaccgaaaggccttttctctcgtttgtttcgctaaatccatatcattctgtgttcaatgaaataaaaaaagaaaacaaaataatatgaaaatcaaaagattactacttttattagctctacctctattggtagcgagttgtacttcttacaagaacgtaccatacctccaaaacccagaggcagtgaacgattttgaggagacccttccgttgtatgacgccaagatcatgccaaaagacttgttgagcatcacggtcaatacgacagacccgaaggctgcgactccattcaacttgacggtacagactccaatcaatgcggctttgacaaatatcagtacgaccacgcaaccgaccatgcagcaatacttggtgaataataaaggagagatcgatttccctgttatcggtcgcttggaagtgggtggtctcaccaagaacgaggcggaggacttgattcgtgagcgtttgaaaccttatttgaaggaatccccgatcgttacggtccgtatggctaattacaagatctccgtgttgggtgaggtggcccgtccgggtagcttcacgatcggcaacgagaaggtgaacgttctggaggctttggcgatggcaggtgatatgacgatttacggtgtccgtgataacgtcaagctgatccgtgaggacgtgaacggtaagcgtgagatcattaacttgaatttgaataatgccgaagtcgtgacttccccgtattattacctgaagcaaaacgatattatttacgtgaccccgaacaagacgaaggctaagaactccgatatcggtaacagcacgaccctttgggtaagctcactctcgattctggtatctattgccggcctgttggtaaacatacttaagtaattgaaaattgagaattgaaaattaagagagatgatagacgaacggataaataataacactgggatagagaacgaggaacaagagattgatttggtcgctcttttatttaaataccttttttattggcgttggtttgtggctagtatattgatatgttgcatcgccacttacctgtttcttcgttatcaaacgcctgtatataacatttccagttccgtgttgataaaggaggaggataagcgaagcggttcgggcaacaatccgttggcggccattcaagacttgggaatgttttccatgacaaataattttgataacgaggtggagatattgaaatcccgtacattgataaaaaaagtcgtgaacgacctgaatttatatgttcgtgtagcggaaaagcgagcgttcggttatgcgatgcctctttataagaatagtccggtgcggatttatatgacaccagaagaggccgataaattggaggagccgattaagctggatcttacatttacaaaaacaggaaaattgtctgttaaggctgaatatgtgcaagataaggaagagcaagagatagaacaggcatttgatcaattgccggcggtgttaccaacacctgtgggtgttttaagctttacgcaaggcgataccttgtatatggaagaagaggaaatcgctttacgtgttaccataaatacgccgacggagaccgccgaggattatatgaaagacttgagcgtgaccgcctcttcccagaccacgacgatagcgaagatcagcgtgaacaatacagtaaaggagcgaggcgtggatttcgtgaatcgtttggttgcgttctataatcaagatgcgaacgatgagaagaatgaggtagctcagaaaaccgctgagttcatagaggagcgtatcggtataattaaccatgagttgggtacggcggagagcgagttggcggatttcaagcaacgatccggtctgacggatttgacaagtgatgcccgtctagccttacaagagagttccaagtatgagcagcaacgtacggagaacgctacacagatcagcttggttcaatttctgcgtacctatatcaacgatccggtcaacaaggaagaggtaattcctgcaaacgtagggttacaggatcaaaacctcactagggtgattgaacaatataacacgatgatcatcgagcgtaaacgtttattacgtacctcttcggaaaataacccggcggtgataaacatgaacaccggcgttgaggcgatgagacgcaatgtcgagacaaccgtgaatagtgtcttgcgaggactacaaatcgcccagaaagatattgagcgtcaggctagtaaatttgagagccggattagtgatgctccaaagcaagagaaagagttcatgactatttctcgccagcaagaaatcaaggcgactttatatatcatgctgttgcagaagcgggaggaaaatgcgatcacattggcagccacggctaataatggtcgtattgtagaggaaccattacccgggaaggatcctgtggctcccaagaagctcgtgtttttattggctgcgtttgtggtgggcctgtttattccggtgggaatcatctttgtcgtggaattattgaaatataagatcgagaatcgtggcgatgtggagcaattgacgaatgttccgattttgggcgaattgcccttgtgtggtcataaatcctccgataagggagcgatcgtagtgcgcgagaataagaacgacatgatggaggagaccttccgaggtttgcggaccaatctgctctttatgctccggaaagatcaaaaggtcatacttttctcttctacgcagcccggagaaggtaagtctttcgtgactggaaatctcgctgtcagcttggcttatttgggaaagaaggtggtagtggttggtatggatatccgtaagccgggcttgaataaggtcttcgatttatcgaaaaggcaggaaggaatatcaaattatctgatggatccggaggataaggatctttttgatcttgtgcagccttccggcatcagtccgaacctggatatccttttaggaggaacgattcccccgaacccgacggaactggtagcccgtgataccttggagaaggcgatagagcaattgaaatcccgttatgactacgtgttgctggatacagccccgatcggtatggtaactgatacggccataataagccgtgtggccgacatgtgtgtttatgtctgccgtgcggacgtgaccccgaaagccgctttctgctacattaatgttcttagggacgagcataaatttgacaagttggcggtagtgatcaatggaatcgacctgagcaaacgtaagaacacctatggttacggttatggtaagaaatatggttatggctatggtaaacattatggttatggatacggctatgggtatggttttgaggcagagaataagaaaaagaaataataaggaaatttataaagagtcatgagacacgtattatttagtccccctgatataacagaggcagagatcagtgaagttgttgatgctttgaagtccggttggataactaccggacctaaaactaaaaaattagaacagctggtagcagaacgttgtcatacctcaaaagctgtttgtttgaattcaaatacggcatgtgctgagataactttgcgtatattaggtataggaatcggtgatgaggttattgttccagcctatacttatacagctaccgcaagtgtggtagagcatgtgggggcaagattggtcatgatagactgtgagcatggaaagttcacgatggattatgagaaattagaagcggcgataaccgagagaacaaaagctataatcccggtggatttgtttggtattccttgtggctatgatacgattttcgatatagtagaacggaaaaagaatttattccatccaaatgataacccgattcaaaaagccttgaatcgagtgattgttatggctgatggtgctcattcttttggagcctcatataaaaaattcccaataggttctgtcgccgattttacgaatttctcatttcatgcggtgaaaaacctaacaacagcggaaggcggtgcggttgtttggagagatattgaagggatagataatgatgagttatatcaccaatatatgttattgagtcttcatggtcagagtaaagacgctttggcaaaaacgaagttgggagcgtgggagtatgatattattgggccatggtataaatgtaatatgacagatgtctgtgcgggcataggcctaggacaaataaaaaggtatgatgagattttgtcccgtcgaaaagaaattatagaccgttataataaaggattgaaggggctacctattacggtggtaacgcattatacttcagatattgtctcttctggacatttatatattataaatctgaatgacaaagatgccgaacaacggaacaaatttatagagaaaatggccggattaggagttgcgaccaatgtacattataaaccgcttcctatgcacacaggctataagaaattggggttcaagatagaggactatccaaatgcttataagcaatttaaaaatgttgtgacattgccgcttcatacctgcttgtctgatgaagatgtggattatgtgattgagtgtgtgaaggaatgtttaaaatgagatctactaataaaaatgatgggaaagaaagttctaatattgggagttgcggcagtacaaatggatgcagttagccaattaaaaaaaatgggatgtgagacattcacatgtgcaatggctaaagatggacctgctgcggatttatcagatcattttaatttgattaatatattagatgaggagaaattagcaacttttatagttgataataaaattgatgtggtctattcaacaggatcagacttagcgatgcctgtagcatgtcgattgagtgagagacttggattacctcattttgtttcttcttatgcagcgaatgtttgtaatcataagaacttgatgcgtgagagactaacattggaatgtgaaggaaatataccttttcaagtgttagattctatagataaaatagcaattcaatatcctgctattttaaaaccatcagatgcgcaagggcaaagaggtatttttttaattcgttcacaatctgaatttgagtctcattttcaagatgtggttaaatattctagagagggaaaagttattgttgaaaagtacatcgaagggccagaggtttcagttaacggttatatggtcaacggagtaatgcgattcttaattgtttcggatcgggatacttggccggaatataccgggttgatacataaacatattgttccaagtaaagccgtttgtaatacagctaattctaaaataaaaagaatcgtagaagatgcttgtaatcggattggaatattgaatggtccggtttatttccagatgaaagtaatgaacggtcatccgtacatcatagaaatgacaccacgtttggatggatgtcatatgtggaatttattggctagatctacaggggttaatttgatgaagttagtatttgagcatctgctatatgatgatatttcagaactaaaatgtttgaattcggatattaaaccgatggagttggttttcttttgccaaaagccaaaaacaataatggatcaatctgctttcttgatacccaaagatgcggaggacagttttttctattatgcgacaggtgataatatacgtccggtaaatggacgttttgacaaggtggggtattttatccatagtctataaaggagtttttggtaatgagaattgctattacgggagcaggtggatttataggctcaaaagtattggaaaaacttgctgattatgatgagatagatattcttgcgttgtcaagagttcaaaatgatagaacactctataataaagtaagatgggtaaagaccgattattcagtagattcattaaataaagtattgaagaatgtagatgtgattattcatttagcggctacaagaggtacacaaggcttgatttccgattatcatgtgaatgagattgttactgaaaatattttattggcaatgaatgaattgaatattaagcatctggtttttgcttcttctattgcagtttattcagatacaacaaaaataccgtggcaagaggatatcagtctttctcctaaaactctttatgggatatcaaaggcatcttgtgaatatctctgtgctttttatacccgtaagtttaaattccgatatactattttgagaattgctcaagttttgggattagaggaaaagcgtaaaggcatgatgaataatttcatcgaatttgcatatcaaggaaaacaattgatagtgaaaggtaagagtgtagctaaacgtcaatttatttatgttgatgatttggctgagacttttgttttgtgtgcaatcaagcagaaagaggaatcaatcattttgaatgttggtatgcaagaggcttatacaaatttgtcaattgcaaatacggtaaattcagtatttgaaaatactaattcaatagattatcaagaggatatagatgaaaatattgactcctcttttatggatactcatcgctatgttagttttttaggctttaagcctaaaacaatgaaagaagctttgtatgaattgaaaaatcgaatagattagatgtataaaaatgtaattaagcgtcttatagatattataatatctttgatgttgattccttttattttgatattaataatcccggtggctttgtttataaaattagaagatcatggtgatgtcttttataatgcagaacgctatggatgtaatatgaaaaaatttaaaatgtttaagtttaggagtatgaaaatgaatgctcctgatgtaaggaatgctgatggtactacttttaattctgaaaaagatgttcgattaaccaagatcggtggatttttgagaaaaacaagtatcgatgaacttcctcaaatatttaacgtacttttgggggatatgagttttgttggtccaagacctagcccgatgggtaatgaaaatacttatacggattttataagaaaaaaatttggtgttagaccgggtattactggatataatcaagccttaaaacggaacagtgctacactagaggaacggtatagaaatgatgtttactatgcggaacatgtttcatttcttttagattgtagaattattattatgacattaaaatctgttcttcgtagggaaaatgtgtacaaaaattgaatattttaaacataagtggaatgatatcagttgttatacctacatataatcgtgctcagacaatacgtatggcagtggatagtgtattaaaccagacatatcgagatattgagttgattattgttgatgatgcttctacggatggaacccaagatgttgttactcagatcgcagatgatagaattcgttatttgcgattagagcaaagatctggggcctgtaatgcgagaaatataggagcattatctgcaagaggagagtttatctcctttcaagatagtgatgataaatggcatcttgataaattggagaagcaataccaatttatgattgatagaaatttggatttctccttttgtggcatgactcggattatgttggaggatcccaataggaaatattattatccaaatgtagatatggatgataataaagattattttgatcaacttctttatttaaatagagttggtactcaaacgattatatgtaagcgagaatgttttgaaaaaatacgttttgatgttacattaaagcgttttcaagactgggattttgcgttacaagctgctcgaatttattccataggttacttgagggaaagtttagtggactcttttgtacaaaaagatagtatatcaaaaagtagtttggccaataaaaatgcatgggaatcattatataataaatataaaaaggatatacaaaaaaatccgactacttatgctaaatatttgtttagattaggaaacgaagtggttctttttaatcaaaaagtggctatggaatattatagaaatagtttttatataaagaaatcaaaggaagccttggtgttttttgtcttgagctcactgagaatgaaatcaactataagcaagttattggattatcagaaaaatcatctttttagataaataagagtaatgcgaaaatatttgttggtatatccaaatcgggattatggtagattgatgtggagagatttagaaaaactcgataatgtggattttattaataaaccattgtttgttaataatgtgttgattgatctgctttttcgtattcattttagctttaaattgaatatgaaaatagaattgccattaaaacgattttgggagaaatattattctttagatcattatgattttgatcaatcgaatgaatatgtgattctgtttacagatccttcattgtgtaattatagaaataattttcttgagaagttgaagaggaaatctaatgtgactatggttcttgtcttaataaattcattttatagaatgagacgtattattgagcctatgttgaagaattttgatttgatatacacatatgatgaaaaggaggcaaagttatttggattttcttattatcctactgtttattcaatggtagatgtgggtgatgttgaaatgataaagcgtaaatgtttttttgtgggggttgcaaaagatcggctggaaaaattgatccgtatttatgataaattggaactttgtggatgtaatccaattttttatatatcaggagtacctaggaaaaagcaaaaaagaaggaagggaattgtttataatacttggctgccatataaatcagtgttgaaagagattttaagttctgagtttattgtggaaataatggataaaaataatgcaggaattacgttgcgtactttagaggcaatttgttataataggaaattagtaacagataatgagaaaatactttgttctccattttatagagaacaaaatatttatttgctaagttgtggatctgttttattaagtgattttttaaaatgtgtagataaggtggattatgggtatgatgggagatattcgcctgtgttatttgtggataaattagatcgttatttgaataaaatttaatttatatttgttttatgatagcaccgtttttgttgtgtgtttttgctgcttgttttagtaagtttgtttatggtaaattatataatcctagtactgtattttttttgatttggatgctgttgctggctttttcaagattagggttgtttggcgttcctgtaccaaatagtgatacgtatttgttgttatttataggattattctctttttttgttgggtttgtatctgttgatttaaagaaatggtttgggagaaaaaatattttttttagaaaatttgaaagcgatgtaaaatattcatatgtattgaattttaaaattgtaattgttctatactctataacatttgtatatttagcttatcaagcggttattgttattggattattgcaatcaggcctaaccctatctgcaattcgagagttgtttacttcttcagatctaaatttgttgagacaatcaaattatatggttgctatacaaaattttatagcgacacctactgtctatttagctatagcgatactcccaatagaatggtttaaaggtaatagaaataagatttttattgtttcaactattctgatgattattgcttgggttcttacttctggaggtcgatctgttattctatggatggctatttatgttatatatttatataagtggaagggtgtaaagataaaattgaaaaaagaaaataggagaaaaattgtactggttgttttgtcttgtattatatcattgatttttacaacgatatcaaggaaaggtgaaaatgttgattttttctttcaaatgtatcaatatttcgttgttccaattgctcatttagaatatagaataaatgaattgaatgcttctttttttaatgtttatgggtatggtatggcttcgttttatggtgttttttatccttttatgtttattttaacgcttgcgggttggaaatatccaatatggttaactactatacgtgatctttcatttatgaacttagaaaatgtggtgttacttgggagtgctagaatgaatgcatttgtaactactttttttcaattttacttagatggtgggatgtttggtgtttttgttgggggggtattgtttggtttttttgttatgcatttttataaaaaagcgaaaaatggtacagatgataaatatacgctaatttatttattattgttgcaaaagttgattttctcatttgttagattctattttacacagcccgttcaaggcataagctttttaatggctttttttgtttataaaagaattagattgtgaggtgtttaaaaatataaattgtaaaaatttgccaagtttaaggagaaatatagtatatcagttcttgtatgaattgttgatagttttcattcctctatttacgatcccctatgtatcaagagttttaggtgctgagaatataggacttttctcttatacatatgcagttgctaactattttgttttgtttgcaaatcttggaattaaaaattatggaagtcgaacgattgctatggttcgaaataataaagaagaattgaataggaacttttctgaaattctatcaattcacattattttttcaataattgtaatatttgtttatttagtgcttttgtttttttttgtagaggataatctggtcatatttcttattcagagcatttatgtttttgctgcagtctttgatattaattggtttttctttggaatagagaagtttaagctgacagtaggaagaaatactcttgtgaaaattttgtctgtatttttagttttagtttttgttaagacacaaactgatctttggatttatgcgctaatattagccctttctgtttttgtcgggcagtcagtagtttggtttgctttaaagcaatatgtctcatggaggaggccttcttgggctaatatgaaacaacatattcgacccctatttgtattgtttttgccgatattggcattgagtctttataagtatatggataaaattatgctaggatccatttcttcgaatgttcaagtcggattttatgaaaatgctgaaaaaataattaatgtgccaatgagtttgataatggcatttggtgtagttcttatgcctcgaattgcaaatatggtgacgagtaaggataaaggagaggtttttaagttaattgacatgtcgatggaagctgttatgttattagcaatagctatctcttttggattggcaggtatttcatttgtgttagcccccatcttttttggttatgaatttgaagaatgtggaattcttataatgggattggctgtgacagtcccgtttatggcttttgccaatgtgataagaactcaatatttaataccttataaagaggataaaatatttgttgtttccttgtttttaggtgctgctgttaatttgattgtgaatataattttgataccatatatggctgcaagaggagctgttataggaactatttttgctgaaattattgtttgtatatatcaatcgtattttgttagaaaaaaaattttcattaaaaaatatttgttaaatacgattccgcctatactaattgggatagtaatgtttgtttttgtttttcaaataggaaatgtaatgaatataaatattgttacattaatacttcaacttgtggtaggtatgtttatttatgctgttggtgtgtttttacttatgttaaaaagtagaacacggttgatggttttgttgagaaaatttgtagtaagatattagtcgcttattatatatattatgaaacattttattcaagctaaattgcctttgatataccaatcgattgcttatattaaatattataaagattttttaagaaacagaaaaatgtctttggctgtttcgagaatgtctgatgaggaacttaaagcttatgatgcgtgtctttataaaaataggcaaggtaaagaactggattgggaaaacctaaaaacttatactgaaaaaatgcagtgggcgaaattattcgataaagatcctcgaaaaacattgtgttcagataagtataaagtgagagattgggtcgcagataaagttggaagtgagtatttggtcccattactagcggtatgggataaatatgacgatgtaaatctcgatatattacctaatcaatttgttcttaaaactaatcatggttctggagatgcggtgattattcgcaataaaaaagcgataacacttgctaaaaaaatagagttgaaaaggaaattgaaattctctttagagacggattatagttgtaggtactgtgaaatgcattataaggatatttcgcctaaaattatcgcagaagaatttatagattctagaggctctgatttggttgactataagtttttatgttttgatggagtgccttactattgttgggttgatatggatagatttacaaatcatactagaaatgtttatgatttgaaatggaatattcaagcgtggaatcaacgatcatatggtaattttaaaggtgtagtagataagccgaaaaatttcgatataatgattgaaatagtaaaaaaattatctcgaggcttttctcatgttcgagtagatctatataatgttgatgggaaaatttattttggtgaaatgacatttactaatggtagtggatttgaggagatttcccctattgaagctgatttgatgttgggggatttatggaaaataaaggaattggacttttagggaaagtgttggaatgatttttctttgtaaatgtatttgtcctgttttaccggatctttatttgtgaggtattctgagttaaatactaataattgaaaattcataattatgaaaggaattgttttagccggtggctcgggtacccgattctacccaatcactaagggagtgagcaagcagttgctccctatttttgataagccgatggtgtattatcctatcagtgtgttaatgctggcgggcatccgggatatcttgatcatatcaacgccctatgatttgccgggattcaagcgtctgcttggggatggctctgattatggggtgcgtttcgagtatgcagaacagccctctccggatggattggcacaggcatttaccattggagcagaattcatcggtgatgacagcatttgcttggtgctaggtgataatatcttccatggtaatggatttaccttgatgctaaaggaggcggttcgtactgcggaggaagagaatagggctactgtttttggctattgggtgagtgatccggagcgttatggcgtggccgagttcgaccaggccggcagttgcctgagtatcgaagagaagccggagtgtcccaagagcaactacgccgtggtcggattgtatttctgcccgaacaaggttgttgatgtagcgggtagcattcaaccgtccgcacgtggagagtatgagatcactacggtcaaccaacgattcttggaggatggagcgctgaaagtccagactttaggccgaggcttcgcttggctggataccggtacgcacgattccctgagcgaggcatctacgtatatcgaggtattggagaagcgtcagggggtgaaagtggcctgcttggagggtattgcataccgtcagggatggataaccgaggagcgtatgcgagagctggcgcaacccatgcttaagaaccaatatgggcaatatctactaaaggtaattgaggaattaaaggagacaggagatccgaatttaggttaagatggaggtaataaagacagatatagagggcgtggtgatcattgagccgaaggtgtttgatgacgctcggggatacttcttcgagagtttctcgcagcgagagttcgaggagaaggttcgtaagataaatttcgtacaggataatgagagtatgtcctcatacggagtgatgcgcggcttgcattttcagaggcccccttttacgcagagcaaattggtgcgttgcgtgaaaggatgtgtccttgacgtagccgtggatattcgcaaaggaagtccaacttatggtaagcatgtagccgttgaattgagtgaggataaccatcgccagtttttcgtgcccagagggttcgctcatggattcgcggtattgagtgagatagctgttttccaatacaaatgcgataatttctatgctccgcaagcggatgggggcatctgtataaaggatgagagtctgggcatagattggcggataccaatggataaggcccttctctcggagaaggatataaagcatccatgcttggaggattttgactcaccgtttgattatcatgtaaatttataccttgaatttgaataagatgaatatattggtgacaggagccaacgggcagttgggaaacgagatacgtatcatcacccgggaaagtgatgaccactatgtattcacggatgtgaatcaagtggaaggagtagagactgtctttttggatattacggatttggaagcggtgagggtactggttgcggagcggcgcatcgacgttatcgtgaattgcgccgcctataccaacgtagatgcggcggagagtaatgaggcgttggccgagaggctgaatgccgaggccccggaaaatttggccaaggcgatgaaggcggtcaatggtttgttggtgcagatctctacggattatgtgtttggcaaagagccttacaatgtgccctgccaagaggatcaacagggtacgccaaccggtgtgtatggtatgacaaaattgcggggtgagcagaagatcatgactgtaggttgcaagcatgtgataattcgtaccgcttggttgtacagtgagttcgggaaaaacttttgcaaaacgatgatgcaccttgcggctactcggccccaactgaaggtggtattcgatcaggctggtacaccgatatacgcttacgatttggcgaaagccatagcggcagtcttgcgtgattatgcgacggacatagcttgcgctatttatggcaagagcggcatctatcattactccaacgagggggtctgctcttggttcgacttcacgaagatgatcgccgaatacaatggcacgaccgcttgtgatatccggccttgtcatagcgacgagttccccagccccgtaaaacgtccgtcctatttggtattggacaaaacaaaaatcaaagaaacattcggcgttcgagttccttattggacggaatccttaaaacgatgtatcactaatttaaaaaacaactgttaagaatcatggcaaaacgaaatatagtaatcaccggtggtgcgggcttcatcggctctcacgttgtacgtctgtttgtaaacaaatatccgggatataacatcattaatttggacaagctgacctacgccggcaacttggcaaacctaaaggatgtggaggacaaaccaaactataagtttgtgaggatggacatttgcgactttgaggcgttctatcaattgatgcgggatgagcagatcgatggtatcatccatttggcggccgagagccatgtagaccgaagtatcaaggatccgtttacattcgcccggaccaatgtgatgggtactttggctttgctccaagccgctaagttgtattgggaaagcctgccggagaagtatgagggtaaacgcttctatcatatctctaccgatgaggtgtatggagcgttgacgatgaaccatccggaaggaatcgagcccccgttcatgacagcggcttcctccggtgagcatcacttggcatacggagatgatttcttctatgagacaacgaaatacaatcctcattcgccctattcagcgagtaaggcaagttcagaccattttgtacgtgcctatcacgatacttacggcatgccgaccatcgtgacaaattgctcaaacaactatggcccctatcaattcccggagaaactgatacccctattcatcaacaacatccgtcaccgcaagccgctaccggtctatggcaagggcgagaacgtgcgcgactggctgttcgtggaggatcatgcccgtgcgatagacttgattttccacaacggaaagatcgccgagacctacaatatcggtggcttcaacgagtggaagaatatcgatatcatcaaggtggtgatcaatacggtggatagtctgttaggacgtaaagagggtgaggatatggatcttatcacctacgtgactgaccgtttaggccatgacgtacgctatgccatcgactcaacaaagttgcaaaaggaactcggctgggagcctagcttgcaattcgaggagggtatcgagaggactgtgagatggtacttggagaagcatgaatggtgtgaaaatattattaatggtgaataccaagattactatgtagaaatgtatggaaatcgttgaaaaataattataaaatgagctatatagtcaacaaacaatacaaaatagccgtagccggtaccggttacgttggtttatcaattgccactttgttatcacagcatcatgaggtggtagccatagacatagttcctgagaaggtagatttgatcaataataaaaaatcaccgattcaagatgattacatagaagagtatttggctagtcataaattgaatttgaaagctacgctagatgcggtgatggcttataaggacgctgattttgtggtgatagcggctccgacaaattatgatagccagcgaaatttctttgatacgtccgctgttgaggctgtgatagagcaggtgcttcgttttaatccaaatgcttttatggtcattaaaagtacgatacctgttggttatacgatttccgtacgtgagcgttttcatacaaagcgtattctttttagtccggagttcttgagagagtctaaggctttgtatgataatttgtatcctagccggatcatcgtgggtacggatttgtctgatccggaattggtagatgccgctcatatttttgctgaactgttgcaagaaggtgctataaaagaaaatatagataccttatttatggggttgacagaagctgaggccgtaaaactattcgcaaatacatatcttgcactacgtgtttcttattttaatgagttggatacgtatgcggaaatgaaggggttggatactcaatcgatcataaatggtgtgtgtttggatcctcgtatcggtaatcactataataatccttcttttggctatggggggtattgtctgccgaaagatacaaaacaattactcgctaattatgcggatgtacccgaaaatttgatagaagcgattgtggagagtaaccggactaggaaagactttatagcagatcaagtacttcgtatggcgggttattatgcttacggggaagagaatgaatggagtagtgtacgggaacatcctgttacgatcggtgtttatcgattgacgatgaagtctaattctgataattttagacaatcttctattcaaggaataatgaaacgagtgaaagcaaaaggagctactgtgattgtttatgaaccagccttgtcggataatactacattctttgggtcagaagttgttaatgatttggatctctttaaaaaacgtagtgcggctattatagccaatcgatatgatgtggaattggatgatgtgaaaaataaggtatatacacgagatgtatatagaagggattaatctaaattaaggttagcgtccaaaaatgacgtatagcatcattcaacagaaatatagatctttgttgctgtaattaaaacccaattaatatgtagagcaataacaattctgaaatttttttcctccgctacaaattcgaagcggtcacgaacaaggattccatccgatccttctgttttagaaataaggtaccgtataacctgtttgaaaaatggttaagatgttttcataggagatgggttgaaatccgtacatttaaggaggctgaacatcaactgtgcctgtcacatgtccgggctaatatgttaaagcgtatgatcaaggaggtgaaaagagagccttggtctttacggacagtttggatttcttctttagaaaggaacgtgattataatgaagagaatcttattcttgaagaaagagtctgatgatcacttactatgcaatgtaacagtatgttacactttggtcgtgacgaaggtatagaaatggcagctgcatatcatggtgtaatcagtactgtgaggcagcgggggaagtgagcttgggatttccttggtgaatttttcaaaaatatttttaatggttgtaaggactttgttaatctcataccccagaatataaagttggtatgtactaacagttaaattcaacgtttttaacataaaattaggtaggtgctataaaagcgcctatacattggtgcatgctctaatttgagtaccaacaaaggtattgcgtgattgccataaattaattaggaaagtactattggcggtttacttttgtttatgtggagtcgatttttaagatatctcctcttctatgtcttcaactcccatggtgtcaatcatgggagtacatatcgccgatatgcttatcggtataacgccaaaaaagaaagaggaacttccatggaagtgtttgcaagaaatgagaaccacaaaggtgcgatgatgaatgtgtagatgatagaatagactgtagaatcgatatagaataaagattttgtaccggtcttctttttcccttcggggaggtaaggaggccggttctgtttttatgtatgccttgatgatccgtatatataatgtgggattcggccttctgcggtgcagggataaatattccccctgtgatcgtggaaatgaaaaatcttatgaaagatttgaagggactgttgggcgagtttcggggttggcctaccgttgagttgtttagtgtacgtctggccggattgtcggcggaagatagggaaaggcatttgctggggttttgtaagctggcttttgggcattatgaagagttgccgatgggatatcggagattggtggatggttatttggatggggagcgaggggagaacttgatggtgtggtatttgacaaggcatacgccgtggaagaatgcccgttatgagttgcatcgaccggacttgtttttgcggatggcgaagctggtggagtttacggatcgggatgggcgtttgccttattctcatttggcggcttgtttatgtatggcgtttttcgtccggagtttatcggatcctaattcggaggtcttgccgaaatccttggctagccgtttgagcgcattgaatatattaccaagtgatattctggaactggcggggaagagggaaataacggatgagatgtgattctttattgataaatgttaaatgtacgtggattgaagtcgatgaaatttggtgtgtttttcgttgatttgggaatgtgtgtgttggctgctacgccgttaactgttttgcatcatctaagttaggctttgtggctattatacctttgtcatgtgttcgaagcatggttacattcatttattcattaaaaacgtatagttatggcattgaaatttaaattggtaatgagaaagaatctaggtgaggatcacgaatctattcctgaaaaggtatacgctcaaatggtgtatggagatctggttactttcgatgaatttgcggaggaggtggcggatagctctggtgtaggtagcgctagcgtgaaggcggttctggatcgtatgaatgtggtgttggtccgtcatttacagcatggcaggcgtgtcagtgtaggtgagctggggcttttccgcttttgtttcggatcgtcgggggtgccggatgagaagacgttttcgacgaacttgattcgggagccgaaagtacggttctacccgggcaaggcgctacgggtagccaagagccggacaagttttgagaaaactgcgcttccgaatgaagaagatgcgggtggaaacgggagtgatagtgaaagtccggatgaaatctaagagctatgaggcgtttgacggttcaattaattgttgcgatcctgctctcaatgagcgggatcacacttctcttcagcggattctggattgatccgcaaggattgatcgataacagtgtactggtggctttcggtgagatcagtacgtttgccggggccctttttggggtggactactcttataaattgaaaattaataattgaaaattatggaaagacatgataaaaggttaacagagcatttttgtttggatgagtttacttatagtggtattgccgtggacaatgcgataaataatcagcctcctccttgtgcatgtctagcgcttcaaaatttggcagttggtttattggaaccattacgtctattgtatggggcaccgattgctatattgagtggatatcggaatgagaaggtaaatcgtcttgctggcggggtcgttaccagccaacacttgaaaggagaagcagcagattgctatgttgccgatgggccggaaaaactgttggatgtgttgcaatgttccggtttagtatttgaccaagctatattatatagacgaaaacgttttttgcatctttccttaaagataaatggaaataacaggatgcaagtgttagtttataacaaatcttgatacttcggtgcggaaagagacttgcccatgatcaagtgcggaagggaagatctgtgatttggtggactgaaaaggatatgatatatttgcctcctatgattaagcttgaatatctaaaaaagatacgtgttcgttggattatattggcgatccttctcatctctgtatggatcgtgatgggaaatcccagattaggcgaatggtattcccgttcgatttatccatgggtatcgggtatgctatctcgtttctcctgcttgttccctttttccgtaggggattgttttatttatggtagcatcgccgggttattagggtatctgtcgtatgcgattataaggaggcggaggatcgggaggacaataagtcatgtcgtggaatatctggcatgggtgtatgtctggttctatatcgcttggggattgaattatttccgggaagattttttcactcgtacgcaaaccacttatgtgcctttttcctcggaacatttccaatccttcttggatgcctacacggattccctgaacgcctcatgggttccgatagagacgatcgatcgggaggtcgtgaaagaggcggtgcaggaagggtatcgggaattgcctactcgtttcgggcttaccactcccggaacctatcttcatcctaaaacgatgctgttctcccggttgatgagtggagtaggggtgatgggatatatggggccgtttttcacagagttcaatttgaacggccagctcttgcccgtgcaatatcccgccacttacgcccatgagatggctcatgcgcttagtatatccaacgaggccgaggctaatctatacagttatttaatatgcacgagttcttccgtgccggaaatccggttctcaggttacttctctttgctgccttatgtgttgagcaacgcatatgtggctttggataaggactcttttgaggcatggaagaaaagattacgccccgagatcaaggacttgtataacgagaaagtagcctattggcaatccctatacagcccgctgatcggcgaggcgcaagacgtggtctataatcttttcctgaaaggcaataagatacctgccggaaccgctaattattcggaggtgatcgctttattgatcgctttggaaggagaatgatttattcatcatttaacttcctccaaataaagcactcggctcgagtaatcattctgcttgtgataatcgacaatgtgattataagggatttccagtccgttcgccatgagatattccccggtgaaagctttaccctcgaaggccagaggctcgttgtcgatccggttcagttcgcagactctgtatttcttgtctggggataatccgttcatttttacacggggtaaatgttggttgacaaaatgctcggtcttccaccaataaaatacggctttgtctttctccagtgaggtgtacatcaaggaagctactcccaaacgatcgtacggagaaaccagacggtagatatcgccgaattgcacgacgggacggatcgtcttataatcggcgatcgccttacggcaaagtgttttctcttcttctgtcatattcttgggttggatctccatgcccaaacggccgctcatcgctacgtcgatccgatatttcaggggaatgacccggaatgtttgatggttaggggcggcgctgatatgtgaggccatggcgatagccgggaaaaaataagaagtgccccattgcatatagatacgctgtaaggcatcggtattgtcgcttacccaaaactcatcgaagtaaggcatgaccccgtaatttgcccggcctccaccgctggcgcaagcctgtagggttaaatccgggtatttggctcggatacgctcacagactttcttgaatccttcgtgatattcgatatacatatggctttgctgatccgaaggcaggtattgggagccatggttcaggatgctcatattggcgtcccatttgatataatcgatctccgggtatgttgtcatcaagttgtcgacgataccgaatatgaagtcttgcacctcgggattggagagatcaagaacgacctgtgtaccgccacgccccaggacgatttccctgtttggagctttcaatacccattccggatgcttctcgtacaattcacttgtcgtgttggccatttccggttcgatccagataccgaatttaataccatgcttgttggcgtcggcgatcaggccctcgatgcctcttggtagttttcgggcatcaaccatccaatcccctaaggacgagttatctttattacgaggatatttatcgccaaaccagccgtcgtccatgacgaacaactcgccgcccatagactggatatcactcatcatttgttccataccttcttgattgatatcgaaatatacaccttcccaactgtttagtaagattttccgggcggtcgctccattcgctatcttatgtttgcgtgcccatgcgtggaaatttcggctgcttccgcttaagccgtccttactgtaagtcagcgccaattccggtgtacggaaactttctttggctttgagggtgtaagccgagttctcctcgtttattcccgcaaagaaatggtgatagtcgctatcatccgtatcgaagaataatttgtagttaccgctatagcatagggcggcgccaataacggaaccggtgttttcctttggttttccgtctagggagatcatcacttcggcgtgggcggtatgggagttgcggataccatccttgttttttatcatcttgatgcccggtcgtaacggttcttgtgccaattgagcctcgtttgcccatgagccgtataagtgggaaacccatacgtctcctttccggatcggcagataagcggaagcgaaacgattgagggtgatcgcttttttctcctcatgcgtgatctctgtccaagtctcgatgatatcggcgtccggataggttctgtaacagagattcatataaaaaggatacactttatcttttaatcggatcgttgtgatatctgccgtttgctcttttcgtgtatctacttttatgacttccagttgaagggtcatattcccgtcgccatgggtaacggacaatgcgctttcggaggggcaattcaagccgtagaccggataagcggaaaatgttttctgctcggtctcgagcaaggtagccgcgtcggaagtggataacttgtctccatagtagatgaatcttacctctccgccgacaggtgcgtctagcaataatgaggtattcctcgtggaaatcaatacgtcttgtgcccataaactagtggtcaatagggaggcgcaacataaataaccgaatttactcttaatgttcattttattagtaggtgttagatttaaattcaggggcaaaagtaggagagagccggtaggtttcctaataggattttatcagatactgttacttttctgctttaactaaaatttgtttcacgcagaagaaacccgtgctttcattaatgaaaattccatattgtctaattcgaaagaaatcactaactttgcggcaattttttagaagcaagataaatacatcgcgatatgagtaagaaatttaccgaatattctaagtttgacttgtcgaacgtaaataaagaggtgctgaagaaatggaaggatggagacatcttccataagagtcttgaaacaagagagggacatcctacattcgtattctacgagggccctccatccgcaaacggtatgccgggtattcaccatgttatcgcccgttcgattaaggatattttttgccgctataaaaccatgaagggattcttggtgaatcgtaaggcgggttgggatacacacggtctgcctgtcgagttaggcgtggagaaggctttgggcatcacgaaggaagatatcggtaagaagatttctgtcgctgagtataacgccgcttgccgtaaggacgtgatgaagttcacgaaagagtgggaggatctgacgcagaagatgggttattgggtggatatggagaatccgtatatcacgtatgataaccgctatatcgagaccttgtggtatctattgaaagagctttataagaaaggtcttttatataaaggctatacgatccaaccgtattcgcccgccgcaggtacgggcttgagcacgcacgagttgaaccaaccgggttgttaccgtgacgtgaaggatacgacttgtacggcacagttccatatattggacccgaaaccggagatggcacaattcggcgatccttatttcttggcatggacaacgactccttggacgttgccttccaatacggcgctttgcgtaggcccgaatattacttatctggctgtacagacttataatccttacacgggtatcccgatgactgctgttatagcgaaagatttattgtctgcttatttcaatccgaaagctgcggagctttctttgtctgattacaaaccgggtgacaagctggttcctttcagcgtagtaggtgagtggaagggttccgagttggccggtatgaaatatgagcaattgatcccatgggtaaatccgggtgaaggtgcattccgtgtgatcacgggtgatttcgttacgacagaggatggtacgggtatcgtacatatcgcaccgacgtttggtgcggacgataaccgtgtggcgaaaacattcggggttcctcctttgatgatgcaggataaggatggaaatatgcgccctatggtggatatgaccggtaagttctataagctggaagacttggctccggagtttgtacaaaattgtatgaacgcctctgattatgatccatggcaaggaaaattcgtgaagaacgcttacgatgatacgaagacggataaagatgagacgttagatatagagatctgcatgatgctgaaggcccagaaccgggtgttcaagatcgagaagcatgtccacaattacccgcattgctggcgtaccgataaaccggtattgtattatccgttggatagctggttcatccgtacgaccgcttgccgtgagcgtatgatcgagttgaacaatacgatcaactggaaaccgcagagcacgggtacgggacgtttcggcaaatggctggagaacttgcaagactggaacttgagccgcagccgttattggggtactccgttaccgatctggcgtacggaagatggtagcgaggagaagtgtatcggttccgtggtagagttgtttggcgagatcgagaaatcggtgaaggccggctttatggagtctaacccttacaaggacttcgctccgggagattatacgaaggagaattacgagaagatcgatttgcaccgtccgtatgtggatgatattatcttggtttccgcttctggtaagccgatgaagcgtgagacagacttgatcgacgtatggttcgattccggcgctatgccttatgcccagatccactatccgttcgagaacttgaaggagttcgataatcgtcagatctatccggctgactttatcgctgagggtgttgaccagacacgcggttggttctttaccctgcacgctctgggtaccatgatttttgatagcgtggcttacaaggctgtcgtgtctaacggtctggtattggataagaacggaaacaagatgtctaaacgcttgggcaacgctgttgatccattctctacgatcgagaagtatggttcggacccgttgcgttggtacatgatcacgaacgcttctccatgggataatattaagtttgatatcgatggtatcgaggaagttcgccgtaagttctttggtacattatataatacgtattcattcttcgctttgtacgcgaacgtggatggcttcgactactccgatccggatgtggaatggagcaagcgtccggagattgaccgttggatcctttctctgttgaacagcttggtgaaggatgtggatggctacttggaggcttacgagccgactcgtgccggacgtgctatctctgatttcgtaaatgataacttgagtaactggtatgtgcgtttgaaccgccgccgtttctggggtggtggtatgacggaggataagttgtccgcttaccagactttatatacttgcttggagacagtggctaagttgatggctccgatcgctccgttctatgccgatcagttattcttagacttggtcgctgttacgggacgtgagaacgttgagtccgtacacttgtccgatttcccggtttacgacgagtctaagatcgacaagaatttggaagagcgtatgcaaatggctcaagatgtttcttctatggtattggctcttcgccgcaaggtgaatatcaaggttcgccagccgttgcatacggtaatgattccggttgtagacgctcatcaacaagagagtatcgaggctgtgaagaacctgatcttgaacgaggtgaacgtgaaggagctgaagttcgtggataatacggcaggtatcttggtgaagaagatcaaaccggactttaagaagttgggcccgcgctacggaaagatcatgaaggcgttggccgccacgattcaatcgatgagccaagaagatatcaacgctttcgagaaagccggaacgtttaccttgatggtagatggacaggaggccgttctggagcgtacggatgtagagatcatctctgaggatatcccgggttggttggtcgctaatgaaggtcgcttgacagtcgctttggatattaccgtaaccgaggatttgcgtaaggaggggctggcccgtgagttggtgaatcgtatccagaacttgcgtaagagcagcggtttcgatataacggataagatccatgtatccattctttcttgcgaggagatggatgaggcgatccatgattataaggattatatcgctaaccaagtattggcggaatctatcgaaatcatggataatgcgatcagcgacgctacggaactcgatttcgaggactttaaattgtccgtaaagatcgagaaagcttaaaaatagaatagcatttcttgcggaagaattaggaatgaaatataggaaaatcgataattatattatctttgcatgcaaagaagaaataatatgattttatattcattcttaattcttctttttgattgatatttgaacgattgttgaacctaaatttttttagaaccatggcagagaagacaagatattcagacgctgagctcgaggagttccgcgctattatattagagaaactggaaatcgcgaagagggattacgagcttttgcgatcaggggttacgaattccgacggtaacgacgtggctgacacgtctcctacattcaaggtgctggaggaaggcgcttctacgttatcgaaggaagaggcgggccgtttggcgcaacgccagatgaaattcatccagaatttacaggccgctttgatccgtatcgagaataagacctacggtatttgccgggagactggtaaattgatcccgaaagaaaggctacgtgctgtgcctcatgcgactttaagtatcgaagcaaaacaaggaggtgcaaagtaaatgagatattctaaaggttggggagcagtgttaatcataatactgctccttcttcttgaccaagcgctgaaaatatggattaagacccacatgcagttgcatgagagtatagagataactccgtggttttatctctattttactgagaatccgggtatggcattcggtatagaggtgattgggaaattattcctttccgtattccgtatcgtggctgtattgtttatcggatattatttgtataagctggttaaagaaaattataaattcggttttattgcctgtatatctttggtttttgcgggggcggtgggtaatataatcgactcgatattctatggcgtgatcttcgaccatagtttcgggcaactcgctacttttatgccggagggaggtggttatgcctcttggctgcatggaaaggtggtggatatgttctatttcccattgatagagaccgtattcccggattgggttccgatctggggtggacaggagttcgttttcttccgtccgatctttaatttggcggactcggcgatttgcgtgggagttttccttttgttaatattttatcggcatactttgtcggctagcctttcgaaagaagagaaataaatgcggagaaaattacggatatatggtatggctttattagccacgacgttgctggcggcatgtagtaaggttccggatggtattctgtcggagaaaaagatgcagggtgtcttgacggatatgttgctggctgaggccatggtaaatgtggattataatacttataaatccgataccatgaagcttgccttgtatgagtctgtattccgtaagcatgatattacacaggcggtgtatgatagctcgttggtgtggtacggccgtaacttggatatttatatggaggtctacaaccgggtcttggccgatcttaataaacggatcaataacttaggggatgtgcaggcggacgctgcgccggtatcgaaccgggattctgtggatatttggcctcgccgttcttatctggtcttgtctcctacctctgtatttaatggggtgactttcgatatacgtccggaaacgaattattcctcgggcagtagtttcgtgctgggcatgcgtgtctggggattgaataacaaaatggcttataagccggaggtacgtttaagcgcggaccaaggtgatacgaccttgactgtgaatagtaagatcacgaaagatggatatcacgagacgatcttgaagactataccaactaagaaagtaaagcgtgtgtttggatatatccgtatggataatatggatacgacttattataaggtgtatatagatagcttaagcttgatgaaatataactatggtaaggagcttgccgaattacctaaggattctattaagtaatctctctatttgtttattatacttatgagaagaattgccgctcattacgtttggtgtaagcaggtttatcgtatgcattatatcgaactggatgataatggtgcgtttcatggtgtttacccgttgaatgaggagatagctggaaccgctttttatgatggagtgctggtgccggttctttcctcggaaccggcgattggttttaagcaggtgatgggatcttggccggcgttaaccgaaaagattacgccgggttgttcagtccatatatatcgtttaagcgggattcccttggcgtctgcgaaactcggcacagaccacagctgtagcgatggccacattgagagactctgaggtgtctcttccttccggatagttcgggatatataatttttcgtttacaaaagcctctatggcgggacgtattccatttccttcattacccattatcaagataccgtttccggataaggttttctcatataagttttctccgccaaggaaggtgccgtataaaggtatggcttgggcagattgggcctgtaagaacgtttccagatcggtgtaatgtatttttacgtgggcgagcgcacccatagtggcttgtacggtttttggactgaaaacatcggcggtatctttgctgcatacgatatgggaaataccgaaccagtccgctaaccggatgatcgtacctaagttgcccggatcttggattccgtctaatgcgagaacaagctccttttccggcgttatttccgttatatcccaattggggcgtttaaagatcgcgagtacatcttggggatttttcaggaagctggctttacgaatatcatcttcttccgctaccaataactccttggccggaatatcgccttgtgtagccatccaagatggcttggctattaataactcacattcaaaggccggtaacatatcggctaccaatttatttccttcggctacaaaaacattattttcattccggaatttctttaattccagagaacggatgtatttgactttggtcttgcttagcatcttagttctttttacaaaacaaaagtacggtaaattctttaaattccagtacattcgcgatcgtaaaaagcttggaatgatgaatcgatctctacgtatatgctattttatctgtatcgtactactactaacctcttgtagtacgaccaagtttgtgccggatggggaatatttgctggataaggtggagatcgtgtcggataacagggactataagtctgcggatttaaaatcttatcttaggcagcaaccaaacttcaaggtgtttggtctgatgaagtggcagttatttgtctatgattggtctggtaagaatgagaagaaatggatcaataaacagttacgtaggattggtgagcctcccgtggtgctggatacgatgttggtggaacagtccgccatggaactagagcgtttttacattaataaagggtatgtccatgcggatgtatcaacgacgatcgatacggcacgccataagaaagcggttgtaacttaccatataaaggcgaacgatccgtataggatacgcaattacacgatgaagttccccgatccgaaaattgatagtttggcacatctgaaagcgcctcgccgctctcccttagcttctgcgttccggtcctcacaggaagagtataaccaattagttaaggaaggaactttatttgaccgggatatattggacaaggagcgggagcgtattacgaccttacttcgttggaacgggtattatggttttaatcgggattatttaggatatatcgctgatagttcttttaaccaaaatgtcgtggatcttgatatgtccatgaaaccttatcggaaggtgttgcccaatgggtcggtagaggatcagccgcatcgtcagtattatattaaggatgtaacggtcttaaccgattataatccgatgggggtaggagaggacgctagtttcatggctacagatacgatgctcagcgcaggggtgaatatcgtatatggccggaacgggaagagtatccgtccgagcgtgctccggaggagtacttatattcggccggggcaattatttagtgagaagaatatagagcagacctattcggcgttcgcttctctaagggctttgaggaatgtaaatatacgttttacggaagtagaggagcgggatacgatgaagttggattgttacattctcacttctcccgcgaagataaatacggtgggagtggatttggaaggtactaactcggcgggtgattatgggtttgcctccagcttgaattatcagcataggaatatcttccgaggatcggagctgttctcggcgagggtgagaggggcttacgaggcgttatccggaaataaggcgaatggctttggtaattactgggagttaggtgcggaaggatccttgctgtttcctcgtttcttgttcccgttcttgagttcggattttcgtaggcggctacgtgcgtcaactgaagcgaaaataagttacaacctgcaaaaacgtccggagtatacgagggcgattctatctggtggttggagttatatttggcaagatcggggtaatacacaggcacgccatacctttaagcttgtagacttgaattatgtgtatttgccggataagaatatggactttatcaatagcttgccggattatatggtgttgtataactatacgaaccattttatcatgagttcgggatatacttattccttcagtaattattctccccagaatcgtttgagaaacacgcattccctacgtgcgtcggtcgaggtcgcagggaatttgttgagtgccttttcgcatcttacgggggcgaagaaaaatgatgacggttattatgagttgtttggtacggaatatgcgcaatatgtgaaattggatttcgattttagtaaaggaatcgtgcttgacagtcgtaacaagttagctttccatataggagtgggagtggggatggcttatggtaactcaaactatttaccttttgagcgtgcttatttctcggggggagcgaatagtgtccggggatggtctgtacgagagttaggtccgggtagtatggaagttgacagcacgacttctttcgctcttcaatcgggggatatccgcttggatttgaacttggaatatcgaacgaaacttttttggaagtttgaattggcggcttacatagatgccggaaacatatggacccggaatgtatcagatgaacgctataaggctggaaactttgatttctctcgtttttacaaggagatcgctgtttcctatggtttgggacttcgtttggactttgatttctttctactacgtttagatacaggcttcaaggcttataatcctcaggagaaaaagtctaggcgttgggcgataacccgtcctaatttcaaggataatttcgccttgcattttgccgttggttatccattctaaattcaatatgtaaaaaagtgtactaaaagtttgcaaggaaaagaaaaatccttacctttgcaccacgaaaataaggatggtcaggtagctcagctggatagagcaacagccttctaagctgtgggtcctgggttcgaatcccagcccgatcacgagggagattctaaaagagtctccctttttttgttataatcagatgccagtttttttcttttgcttgttttgatcgttgtttattgatcttttatagaaaactttgagtgttatctatcggttattatatagaagatttcgagatagaatttcataattttgtttttgatgggataagggctattaagcaggattcctgtatttgagattaaacagattgtaaatattaaaaaagtagataagatggaaacatttgacgatatcattaaaggggataaacctgtattggtggatttttttgcgacatggtgcggcccgtgtaaggtgttgagtccgacggtcgaggcattggggaaggagctggcgggacaagtgcgtgtccttaaaattgatgtagataagaacgaggcacttgccacacagttgaggatccaatccgtacccactttgatcatctttaagaaaggtgagatcgtatggcgctcttccggcgtgatggatcacggaagcctattgcggaaggcgcaaagctatatcgattaaaagccgttcatcgggatcaataccgttgggatcaataataggaatcctaggatcactaggacaaggatgaatttccatgcccatttgaaccatttatcatacggaatacggcttactcctagaaccgctatcagaacaccagatgtgggagttatcaggttcgtgaagccatcgccaaactgaaaagccatgacggtggcttgcttggataaaccgatcaactctgagaatggggccatgataggcatggtgagggccgctttggcacttccggaaggaataactaaattgataagcgtttgaataacgtacatcatcccgaccgtagctacttgtcccaaaccttccatccctttcgctaggttaaagagaatcgtatcgatcactttaccgtcttgcaggattacgataatacctccagctaagccgacaaccaaggcggcgctcatgatatccttgcaaccttccaagaaaagtttcacaagctcattcggattgcgtccattggcgattcccgccgctatacccaaggcgaagaacaaggtcgctatttccataatgtaccacccatagcccattacgcctgttatcaagaaaaagatcgtgaagaataaaaggttcaatatatacaaatgtacggttttccgtagggtaaatatcgagctgatcacgaaagctacgctaagaatcgggattaagggtagtcccttgattacgctatttcctatttttaaggatgtctgggggtaatagatcgaaaagataactagtacgattgccaataggacgaaactgatccatgcggctttcggggttctgtatacgatttctaaggaattggtactatgcaaatctctccaatattgatcatcctcatagacgggcgatagttgagggttcttttttaccttggcggcataacgcaatatccatgtgaagcctaccacattgataatacaccaacaaacgatacgatactcgatgccggaaaaaagaggaattcctgctaagccttgcgctataccgatagtgaaagggtttaaaatcgctccggcgaaacctaatcccgccgctataaaaaccatacatacgccggttatggaatcgtatcccatagatatcgccatcgggaccaagaccagacaaaaagcgatggtctcctcactcatcccgaatacggccccgaatatactgaaaagtagcatgatggcggtcaataagaaattatctatgcctattttacgaaggatggggttgttctccattttgcgtgcttttcgtaggaaactgactgtcccgatatcaaatgccttactgtcgttcacgatccagaatgcaccaccgatgatgaggatgaagacgatgatatccgccttgtccacaaatcctttataaaaggcggagagtacctcccatgtttgaggtacgctttccacggattcatatacaacggtccgctctccatctgggctgatattttccgtgtattgcccaccggggataatccatgtcaatgcggcgcaaaataagatgatgtaaaaaatgattacgtaagtgtggggtatttgtctctttttcatgattctgctttttcgtcttcttcagttaatattccgatctcgggaaggatagctcgggcctcacggtcgctaagcgtatctacgtctttgagtttacgttggatggcacgggtacgggtacctaaaacctcttctatttgcccgctggcggtttgcaagttcttttgggctttctcgagcataccgcctactttctcgaattcttttttcacggcccctaagatcgtccatacctcccctgagtgcttttggatcgccaatgtacggaagcccatttgtaaactgtttagtatggccgctagggtagtgggacctgttacgactaccttgtagtttcgttgcaagtcctccaataaagcggaacggcgtacgacctcggcgtaaatgccctcgaacggcaggaacataatgccgaaatcggtcgtggcgggaggtgccagatatttgtccgaaatatctttagccatcttcttgatcgttgtctccaataattttccggctgtctcgatcgcttgggaatctgcggcatcgtaagcgtctaggagctgttcgtatacatctttcgggaatttagcgtctatgggaaggtatacgaattctcgggcatcatcccgcccggggagcttgactgcgaattcaacgaccgcatccgaacctttccgggtatgtacattcgcctcgtattgctctggtgccaataactgctccaataacatactgagttggatctccccgatatttccccgggtcttaacattactaagtacccgttttaatcctcctacatcctgtgctaaggtttgcatctcgcccagtcctttttgtacactttctaattgttcggtgactaaacggaaagattgcccgatacggtcattcaatgtcttttgaagtttctcgtctacggtgactcggatctcttccagccttttttccgtgttatccactaatctctgttggcgttcgtccaaggcggcgaatttctctttctgcaacctgttaaaagaatcgattccacgttcgaaggcttccttgaactcattcatggaacgagccagctcttctcggttatcttttgctactaaccggctttcttcccggttcaggcggaagtcctccctaaagtttttctcgatacggtcgaacgagcgttgtatctcgtttagtaacttttctaggtcttctttattattatttagctgtttaggacgcaaaaggatttgcgtcacgatgattataagaagtccgccgataataatccaatccatctgtttttaattttgacgtcaaagataggtaatctgtattttgcaacagtagttaaatagagttaaatgaaaaaacattgtttattttcgtttgttttatcgacagaaagctgcttatatttgcgcagccaacttaaagtaagactatttaatttacatacaaagatggcaaaagtaacattaaaaggtaacgagattcatacgaacggcgagttgccaaaagttgggacagaggctccggactttaagggtgtaaaaagtgatttatccgaattgtcgctaagcgacttgaaaggaaagaaagtggtgataaatgtttttccgagcttggatacaagtgtatgtgcggcatcggtaagacgcttcaataaagaagccgcttcgcatccggatacggtggtattagctgtttctaaagatttaccttttgcgcatggacgtttctgtactacggaaggtattgataaagtgattacattgtcagtgttccggtgttcatgttttgaggataagtatgggatgcttctggtagacggtccgctgaaagggttattagcccgtggcgtgatagtggtcgatggagctggtaaggtggtttatgaggaacttgttcccgagattactaccgaaccgaattacgatgcggctttagctgcattgaaataaatgtagtagattattgtttttcattggttaaagttaagggttagtgtaggaggccgtcggatgtgaatcccgcggccttcgtttttttaatacaaacacgtttatatggataactggaagcgagtatttgccattatttggacggggcagttcttatctatactgacaagttcgattgttaatttcgcgatagtcttgtggttgagtctggagacaggttccgctgaggtattggcatttgctacgatggccgctttgttacctcaatctgttttggggcttttcacggggatctttatcgaccggtggaaaaggaagcgggtgatgattatggcagatagctttattgctttttgtacgttgatattggcggtcttgttttattttgatttggctaagattagtcatatatatgtgttattggcccttcgttccgtaggttctgcctttcatatgcccgctatgcaagcttctgttcctttgctggctccaaaatcggagttgatgcgcatagctgggattaatcaggtgatccagtcggtgtgtaatatcgccgggcccgctttggccggtctattcataacgatgatgaagatgacgaatatcctcttattggatgtggctggagcggcgttcgcttgtctatcgctctgctttgtctttattcccgatccttctcatgaggaacgaaattcagaattgcatctttggagagaggcgaaagaggcgattatggaagtccgtaaccaatatgggctatcgtggttattcctattgtctatattggctacattcgtgattatgccggtaagtgtcttattcccgttgatgacgttgaatcactttgccggaaatgctttccaagtgagtttggtcgaggtttcatggggtggaggagccttgctcgcgggtgctttactggggcttaagaaatatcgttggaatgagatactgttgattaatgggatgtatatagcgttgggattgacattcttgttttccgggttgttaccggtatccggttttatctggtttgcggtgctgacggctttaggaggtgtttgtggttccctgtattttgctacttttactacggttatccaatctcgcattgatccgggagttatgggaagggtattctctttttacatgagctttagtatgcttccttcgatgatcggtcttttgagtaccggctttttggcggattctatcgggcttggaaatacctttataataagtgggggctttttatgtttgataggtattatatccttttttatcccttcgttgatcagtctgaaagagagttttaagagataacgatatcgtatttagacactatttaatatgaataagaaaatacttcaactggcgataccttctattatttccaatataaccgtacctttattgggattgatagatgtggcgatcgtgggacatcttggatctgcttcgtacatcggggcgatcgctgtaggcgggatgctgtttaatattatctactggatattcgggtttctccgtatggggacaagcggtatgacttcccaagcgtacgggaaacgggatttgacggaagttacccggatcttattccggtctgtcggggttggtttcctgatatctttggggcttttgatacttcaataccctatcttgaaggttgcgtttactttgatcgacgcaacggaggaggtaaaacaatgggcctctctctattttaatatctgtatctggggagcgccggctgtattggggttatatggctttgccggttggtttatcggtatgcagaattctcgtttcccgatgtttatcgctatcgcgcagaatatcgtgaatattgtggccagcctatgtttcgtgtttgtgctgggtatgaaggtggaaggcgtagcgttgggaacactgatcgcccaatatgcgggtctcctcatggcgtttgctctttggttgaaatattataaacgtttgaaagcgtatattgattggaacgggctttggggtagggaggcgatgcgtcgcttcttctcagtcaatagtgatatatttttccggaccttgtgcttggtcgctgttacgactttctttacttctacaggtgcgagacaaggggatgtgatattagccgtaaacaccttgttgatgcagttatttaccttgttctcttatataatggatggattcgcttatgcgggagaggcattagccggtcgctttattggagccaaaaacgatgtggggttacgtaaatgcattcgcttattgttcctatggggaatcggcctctcattgtctttcacgatcctttatgcgttgggagggaagaattttctgggattattgacgaacgatacctcagtcattgaagcttccggggattatttctattgggtgttggcgattcctttatgtggattctccgctttcctttgggacggtatctttatcggtgccacggccacacgccagatgctttactcgatgcttgtggcctcgggcactttctttattatgtattacttgttttatcaatcgatggggaatcatgcgttatggatggctttcctttggtatctgtctttacgtggcggtatgcaatgggtactttggcggttaaaaaaataaggcgagaacctgtaactgatcctcgcctcattttatcctaggaaaacctatttactgttgtttgtaataaactaagtcctcacgattgaagttgttgatgaaggattcgatcttatcaatctcagcttgtccgtagtttacataaacctcggcggaacggcggaagctgtcatctttgtttgcgtcttgcaatagcaagtagccgaatacgcaatgagcggctgcctcgaccatacggcgagcttggaagtcaatatattcgttatcctttgtctccgtaaccttggctaccactttctcatacttctcggtcatagcggcaagtttgttcttcagagcctctaattccggcttatactcgatcgcttggtattcacgaatctggttcaaataagtacccgtggtgacgtggcggatggccgctacgacttgcaattgggtggtaccctcatagatattcgtgatgcgggcatcccggtagatacgttcgcaagcgtagtctttcatgaaaccggaacctccgtgaacttggatagcgtcgtaagcgttctggtttgcgtactcggtagtcatgcctttacccatcggggtgaaagcatccgcgagcttgctgtacttcttgaattcttgacgttcttccggagtcagtttacgttccttggatatatcatccaacgctttgtagacgtcaacgaaacgggcggtctcgtataacatagaacgggaagcatccgctttcgcacgcatcaaggcgataatctcagcgatcgccgggaactcgatgatagacttaccaaactgtttacgatccaaggcgtaagcataagcctcacgataggcagcctcgctaagtcctacggcttgagccatgatacccagacgggcaccgttcatcaaagccattacatatttgatcaaacctagcttacgatcaccgcaaagctcggctttcgcgttcttgaataccaactcgcaagtaggagagcctttgatacccattttgttctcgatacgacggacattcacgccaccattgcgcttgtcgtagatgaacatggaaaggccacgtccatccttcgtaccttcctcggaacgggccaataccaaatggatgtcagcgtcgccattcgtgatgaaacgctttacgccgttcagataccagcaaccgtcagcctcgttgtaagaagctttcaacataacggattgaaggtcggaacctgcgtccggctccgtcaagtccatagacatggtctctccgtcgcaaacacgagggatgtaacgttggcgttgatcctcgttgccgaactcgtataaggtctcggcacaatcttgtagaccccaaaggttctcgaaaccggcgtcggcacgggaaaccaagtcggcggccatgatgtaagggacgatcgggaaattcaacccattgtagcggcgaggcatagcgatacccatcaagccggccttgcgaacggcatcgaggttttgctgtgtcccggaagcgtacgtgacacgtccgttcgctaccgtggggccctcatggtctacgccctcagcgttcggggcgataatttccccgcaaatctcaccaacgatctccaatactttctcgtagctatccattgcgtcctcaaaatcgatcggagcataatcgtatgtatccttgtcggcatagccgcgctctttcagctctacgatacgcttcatcaacggatggtgaagatgatgcttcaagctgggattatctgtatagaaattagccataatcttacttactgttctttttgtaatacttaatcatcttaggaatcacctcttctaccgtaccattgattacgtaatcggcgatcgtgttgatcggggcgttctcatcattattgatcgaaatgatgataccggcgtcttgcatgccggcgatatgctggatctgcccggagataccgcaagcgatatacaatttcggacgcaccgtgacaccggtctgaccgatctgacggtcgtggtcgcagaaaccggcatcgacagccgcacggctggcacctacctcggcgtgaagctctttcgccaaatcgaacaataaattaaagttctccttagagcctacgccataacctccggctactacgatcggagcgcctttcaggttgtgcttcgctttctctacatgacggtcgatcactttcaccacatagtctgtctcggggacatacttcgctacgtcgtggtggatcacttcgcctttatagttctcgtccaaaacctcctttttcatcacgccctcacgaacggtcgccatttgcgggcgatgttccgggttgatgatcgtggctacgatgttaccaccgaacgccggacggatctgatataataagttctcgtaggtgatacccgctttcttgtcctcgtgcgagccgatctccaaagaggtacaatcggccgtcaagccgcttgtcaaggccgaggatacacgagggcccaagtcacgaccgatcaccgtagcgcccatcaagcaaatctgcggtttctcctccttgaacaaattgatcaagatagaggaatgaggaagtgacgtataagggaacagacccggagcgtcgaacacatgaaccttgtcgacgccaaaaggcaatacttgtttctctacaccctcaaggccggacccggcaacgatcgcctccagcccacagcccaattgattggctagcttacgacctttagtcagaagctcaagacttacatcggcaacgttcgtgccttctgtctcacaatatacaaatacgttgttcataatcttatccgatggtgtggttagctaacagttcgacaatcaaatcctctacttcttggtcggcgctggagatggtcttgctttccttggcttggaagacgatattctcgatcgcttttaccttcgtcggcgaaccgctaaggccgcattgaaccaagtcaccattcacgtcggctacgctccattcttgaatatccaaatacgggcgggtctcgtacaattccgggtagcgaagagtcggcgtaccgtcctggtgacaggcgggttgcacggcccgttcctgtttacccatggcgtgtttgtacttttgtaccaacttcgcgttgcggggacggcagggagcggcggagccgttcacggtgataacgataggaagcggaccttccacggtctcgacacccccgtcgatatgacgttttacggtgatacgtccggcctccttatcaacgtttaggatttcctcggcatacgtgatctgggtcagtcctaatttctcagcgacttgcggacctacctgtgccgtatcgccgtcgatcgcttggcgaccaccgatgataatatcataatcgttgattttcttgatagccgtggcaagcgcataggatgtggctaacgtgtcggctccggcaaacgcacggtcggtcaacaaaaaaccgccgtcagcaccacgatacaaaccctcgcggatgatttcggcggcacgtcccgggcccatcgtcagcagcgtaactgtcgtcccggggtaagcgtctttcaagcgtaacgcttgttccaacgcgttcaggtcttccgggttaaagatcgcgggcaaggcggcgcgattgatcgtaccgtccgccttcatggcgtcctttcccacgtttcgtgtatccgggacctgtttcgctaaaactataattcttaaactcatattatataggaatattagatttttatattgatgtaatacttctactttcttgttaatctcgaggtgcaaaagtaatcaaacattctttataacaaagaactttgcggaggaaattgcacacttggcgtgtgtttgagcatgtattgcctgctgattactcgtagcaatgataggttctcttccggtttgagcccggtttttttttctcgatgcgccattcccaaggctgcgatttcgtcagcgtgcggaagaacttggagaataccgagggctgcgagaaacccagcttggcggcgatcgcggtgatgctcatgtccgtccgctccatcagctcctgagcttcgaggagaaggtagcggttgcgccattccatcgccgacatgccgccgatggcgaggatggcgccccggagctcgctggtcttgagttgcattatgcgggcgtattcgctggtgtccatccggccgtacttgcggatgagataggcgaagagatcgatcaggttgttgcccgaggggcggttgccgtcgaagtcgggagggacgcccatccaaagctcttcttcggtgggtttacgcttgaagacggtgataaagacatcttccggggggattctcttgaatgtttcttccatgatgatctgttttaaggttgttttttctcaaggatttgatcttgcgattcttccgggtcaaatctacggattatgattggatatcgcaagccttaaaggtcaaatccatgtgattggattagatattttagaactacgaggtcaaatcaaaggtaatggatttgacctcgtagttttactgggtcaaatcttttggctatccagcctctttacgacttgtccgtacacgatcaacgctacggcggataccaaggcgatcgcaccgaagtaataccagatgtaatgggcgttcgcgcttgccgccagccattcctcgtgagaggcgaacagggttggctccgggcaatacttgcttaaaaggaaaccggatagcccgaatccgaagatagaggagaggaaagaatgcaaatggctgaatccaagatagagaccttcctctcccttgggtgcttgcaaggagaaatactcgagaaagcgaggggaaatgaacgtctccgccagcccttggaagacgatacccaccaccatcatgaaggctacgggatgcatccctaggatcaaggaattagtatccagcatattaccggatgccatgcaaagagcggacaccggcatgataaacatacccaccgtcatggaggtaagcgctgtccgcttccgcatcatctgtgttactagattgactgtcagaactacgactaaagggtttacgttggcataccaagaaggagaggctccctcgccggccaaacgaagcacatattttggcatcgtggcatacagctggtgttgtaccatccagaatccggtgataatgatgattaatgtaatgagccgtccgttactacaaaccttgatcaaggcgttccagatttgcccgaacgtcttgccctcgcccgaatgctgagcgcttttgtagaagaaccagatggctagcaaggcaaggaaggtcatgctcgccgagaaatagttcaaggtaatcaaaccttcgttgcccaacgcctcacgaagcggcttcacgatggtcttcccggagaaggccccgatatttaccatcgcgtagaagatagagaagcccttcgcacgggtttccggcgtagtctctttagcgaccgtgccggagataacgctcttgataaaagccccgccgcatacgatcaaggccatgatagggataatgccgtactgaagattgctctccagcaatcccgtaaaggtagtcgtcgtgctgtattcaaccagtccggcggattgaagccaagtagggtaaacagccagtcctagatagccacaagttaacaaagtgaaagccagtagcatcgagttgcggaaaccgatcttatcggccaacgctccggcgaatgtgggcagcagatacagacaagcggaaaagataccggcgatgctggcggcctgaatgtcgttaaagcctaagatgcggctaagataaagggttataacgataaatacgccataataagcggctcgctcgaacaactcgacggtgttcgctacccagaatgctttactgaatttgattttctcttgtttcttagttgtcatgatattatttattagtaagatagattagatggataagtcaaagaggaggcgcaggcgagaaaatgaagagctgcgcctcctcgtctttgttttatcgtatagtaattacgaattagggctttacggtatacggttggtggatcgccttatcgaaagctttccaatgctcatccgtcatgttgcccggcgtaaacaacgccacgccggccgctccgttctccatggagcctcttacggcctcctcgatctcggacgggatcagtccatggccttccgggtccttgatattcgccttgttctgccaatcctcgcagatgaacagaccgctataaaccggcttcttgccttgcacggcggctacttcctctttcacgatcggagccagccaagaagcgtcctccagatagaaatcgttataattcatcgggaagaaagcgtcgatattccatttattccattcttggcgaaccatccacttggcgtgagagtccggccccgggaatacggcggcgctcactttcttgcctttgccgtgaacctcgtcagcgatgcgatttaccaatttcgtgatcaggtcgcaacggaactgcgcccattccgcgcatttggaaggatcctctacggatttgatatcgataccggtagcggccttgaaatcggccacgcatttgtcacagtagcaatagtccgccgtaggatattcctcgtccatcaccaagccgtatttttcccaaagtccgcgggccaggatgacatccacgtaacggatataatccagatggatataatccacctccgggatatcggctaccttgccatatagattcagcaagaactcagccgtgccttcttggttcgggcacaggcatttgtaataagggacatatgcctgtacggaataggccgactcgcctttccggtttacggcgtagagggtggagtccaatccatgttgcaacatggcaggaatccacgcatggtattccatgccattggcatgggccgctttggcggcacgctggattttctccgtgtcgtggccggcgttgtagcacatcccgtctacaccgtgggcatgccatttactaaagtccgcttgtaaggtttgctcggtggtattctcaccttcgccttgccatgcgtagaccttgactgttttctcgggcgccttgacgcaagccgtcagagcgacggccgccaaagcgataaagagcttcttcatatctcgcaagcgcataaagtcgggatcaagttacgatcgccataagcgttatctacacgggctacgttaatccagaacttgctgtcgtgcaaccattccagcgggaaggcggccttcgtgcggggatacgcgtgtttccactcgtcggcggtcacctcgtattccggatgcggggcgttcttcaagacgttgtcctccttcgaagccttgccttcctccacctccttgatctcgttccagatacattccattacctctacgaaacgatccagctcggccttgctctcgctctcggtcggctctaccatcaaggtgccgtgtaccgggaaagatagggtaggagcgtggtagccgaagtccatcaaacgcttggcgatatcgccctcgtcgatgcccgaacgctcttttaccgtacggcattccaagatcaactcatgacctacacggcctgtcgctccggtatagacgataccgtacgtatccttgaacttagcggccaagtaattggcgttcaagatggccgtcttcgtcaccgtctcaagaccttccgtacccagcaagcggatgtaagcgtacgtgatcggcaggataccggcgctaccataaggagccgcggataccgtattcaagtcgctgccccaaagcaccggatgctgcggcaagaacggaaccagatgctcggccacgcagatcgggcctacgccgggaccaccacctccgtgaggagaagagaaggtcttatgcaggttcaagtgacatacatcggcgccgatcgtacccggatttgtcaatccaacctgcgcgttcatgttggcgccatccatataaagctgtcctccgcaagcgtgaacgatgtcgcacatctccttgatgtccacctcgaagataccatgcgtagacggataggtaatcatgctggcagccaaacgctccttgttctcctcggctttcgcacggaaatcttccagatcgatattaccattctcgtcgcatttaacggttacggtcttatacccgcattggatagcgctggccgggttggttccgtgggcggaagccggaagcaaaacgatatcacgatggccttggccgatgctttcctgataagcacggatcacacgaagacccgtgtactcgccagcggcgccggagttcggttgcaacgtacagcccttgaagcccgtgatcgtgcataagtaagaagacaggttctcgatcagctccgtatagccttccacttgctcctctggagcgtacgggtggatattcatgaattccgcacggctaagcggcaacatcgtagaagccgggtttagcttcatcgtgcaagatcccagcgagatcatggattgggccaaggaaacatcctttcgtcccaaacgggtgatgtaacgcatcaactcggtctccgtatgatatttcttgaatacgtcttgctgcaagaaatcggaggtacgggcgaatttagcgtcgaaataagtctgggcggggatagactcgtccagcatatagtctttacctgcggcgccggcgaagatgtataataatacgcctatgtccgtaggcaatgtcgtctcgtctatgctgacgcctacttgtccggcctcgaagtaacgcaagttcaccttgcactccaaggcgatctcacgcagtgcgttcaccgacacgtgcgcgggaagctgtatcttcaaggtatcgaaataatccttgtttaattgcgtatatcccagtttctccaactccttggccaagaatccggccgtggaatgaatccgtccggcgatgttacgcaacccctccgctccatgatatacggcgtagaatccggccatggtagccaacaacgcctgagccgtacagatattggacgtagccttctcacgtttgatatgttgctcgcgggtctgcaaagccaagcgataagccggatggccgtaagcgtccttggagataccgatgatacgtcccgggatcgtacgtttataatcgtccttcgtagcgaagaaagcggcggaaggacccccgtagaacatcgggataccgaagcgctggctgctaccgaatacgacatccgctccccattctcccggaggagtcaacaataccaagctcatcaagtcggcggctacgcctaccttggctccggcggcgcccgcacgggccacgaattccttatagtcctcgatcgaaccatccgcgttcgggaactgtacgatggcggcgaacacgtccggcgtgaactcgaatttcttataatcgcccactaccacctggatgccctgcgggatcatgcgggtgtggatgacggccagcgtagaggcgaacacgttctcgtcaacgaataccgtattggcttccgctttcacctgcgcacggctgcgtgaaccatgaaacatggtaaccgcctcggctgccgctgtcgcctcgtcgagtagcgagcagttcgccaagggcaatccggtcagttcgcagataacagtctggaagttcagcaacgcctccaagcgtccttgggatacttccgcctgatacggcgtataggaggtgtaccaaaccgggttctcgaatacgttacgttggatcggggccgggcaaaccgtgtcgtaccaacccataccgatataagaggtgaatacctcgttcttggaagccagctcggcgatatgctcggcgaactcacgttccgtcatggcctccgggaggttcaacggctctttcaaacggatgttggccggaatggtctgatcgatcaactcgtccaaagacttcacgccaatcgtctccaacatagcgggaatatcttccgctgagatgcccacgtggcggtttacaaacttatttgtgtccataattctagtattttataaataaggattatttaatttctcatcaatgattcgtgtctcggggccatggccggggtataccacggtctcgtccggcaacgacagtaatttgtccttgatagcggcaagcagtatatcttggttgcctccccataaatcggtacggccgatgcttccggcgaacaaggaatccccgacgatcacgaaaccgttcttcttgttatagaaagccacgcctccgggcgaatgaccgggaacgctcaataccgccagctcggatttcccgaactttatgatttccccgtttaccagatatttccctaccgggacgcttttcgccttcatcggcaggccgaacgccttggcttgctcctcgggggagggaaggccctccacgtccgctttatgggcttccgggctcaacccgtaggtgttatggacgaattcgttgccgaatatgtgatccagatggaggtgcgtacaaaggtaacgtttcagcgtcagcccgttctgggcgataaagtcgcttacttctttttgttcctctttgcgcaggcagccgcaatcgataaggactgcctccttggtatcatcgtatagcaagtaagtattctcggagaaatagtttacttcgaaagattttatcgtaatcataagggtacgtacactacttttttagtttcaaaaaactcttctttaaaatggtctttcagatccatgcttatcgcttggttccggaaaggcaatatctcgtgcgccagctctccacctttcagacaaatcaatccgttgggcaatgcgttgatctgttctttctttatattcttgcggacgatctttaccagatccgccagaggcatcacggcacggcttaccacgaaatcgaaaagctgcttttcctcctcgccccggcaatggcggaaggatacgttctccagcccgatcgcctcggccacggcttgtcccaccttgatttttttcccgatgctgtctaccagatggaaatgggtctcagggaataagatcgccaaggggatgccgggaaaaccgcctcccgtacccagatccatcaccgaggaacccggcttgaaacgcagcatatcggtgatacccagcgagtgaagcacgtgatgcggatataggttctcgatatccttccgtgagatcacgttgatcttggcgttccaatccgtatataggtcatatagggcggcgtattgctctttttgccggtcggtgagatcggggaaataagatgtgagaattgaaaattgagaattgggaattgagaatttctctgtattttgttccataggacatctgtttataggtttatctatcattaattttcaattctcaattttcaattttcaattaactgacttatcgggctgtcatcccgcagcaaatagcggatttccttgtaagggagatggacgttcgtgacgcctaccacgtatgccgctatctcatattcgttgaaagaataggtgatgcccgtctcgtctacgaggaagttgccgttcgggaagatctcgtccacgctaaagaaaccgatattttccagttccttggcgtcggatacgttgttttgcttggcgatctgatctaccaatattcgcgccagattgtcttgatagttgtccacgaatatctcctcctcggtgatcggcttaccggtcttgaggttcactacatggttattgtaggaatgcgcgccgtgcgctccgcccgtatagttctcgaagcttaccgtatagctgatgatatcgtcttggttgaaggcgatatcatccgacgacatctcgtagtaagagaaccaagagcccaccggtgtctcgtcggatttcgccacctcagccttgtaatcctcttccagatccttataagcggccagatagtcgtcggtatatttccgtaccgcctcctcgggggataattgctcataattctcgccgaaataagaggagacgaactgtctctgtagattcttaagaacctctttatccgaatatttccggggataaacgaacttgatctctagattgcaattgggattatccggattatctaacaaatggtaagtcttttccacgctgatagaatcaaacgtgatactgttttcagaagccttcttcgttccggtatcgcaacccgtggctaagatacctatcaaaagaagcgccagcatgctttcgcgtaaatgcgttctcatcggactacagatttaatttatttgtacgcgaatgtacgttattaaattgtataatcaaattgcacgatgaagtttaataagaggacaaccataccttaaattccgccgccttatttttagccacgaaaatgggttcgtcggtcgggaggctcagatttatacgtaatcggctatcgaaccagatggtgaagctatctattacttccttggaaaggataaactgtcggtttacccggaagaagcaagtcgggtttaattttatcattaaggagtctagagatttaccgatggaatatgattgtctctcgcgggtcaccacgctactttcgccgttcgtgttatagaaataagcgatcgcctcggttttgatcggtataatccgatccttgaatgggacgagaatccgctttagatattccgagctacaaaccaattggtcgatccggctgatatgctgccgtacggtcaccggattaagtcggttgtatttatctagtgcctttcgcatgctctctaacgtgataggcttcaatagataatcgacgctgtttacctcgaatgccttgatcgcatattggtcgtatgcggtagtgaatatgatgggaacctctatggtgacgcattcgaaaatattgaaagagtttccgtccgccaattggatatccatgaagatgaggtcgggcatgggatgactacggagccatgtcacgctatctactaccgtatcgaaatgatccaagatctcgatatgcggatctatctgtagtaataagttcttgatgttcttgtaggctgcggcctcgtcttcgataatgatgattttcatgattgtttggatttagattaactctttaaaggtagggaaacacggaaaaactcatccgtatcctctatccttattcttttttttacgagtagggcaaagcggttatctaggtttttcagcccgatacccactttctccacctcgtccagcttgggctgtttccggtttaggatcaccaaagaaggttcgtgggtgctgtaaatggataatcgcattgggttgcgggcgctgatctcattatgcttgatcacgttttctatcaatggtagcaaggaaagaaccggtagctggcaggacatataggctgggttgatctgtatgtcgaacgtcagtttctcctcatatttgacggatagcatgaagcggtaggtttccaaaaaagatagttcgtcctttaacgccactaattctttcttctcgctttgaagtatatatcggaatacattggataggttggagagataagccagtgatttctgattctgtccttcgactatcaaggcatgcaaagagttcaacgcattgaagaaaaaatgagggttgatctggttgtacaaggcatctatctggctttgcagggattcgtttttcagtttctcgtagtttcgctccacttcctctttacgtgcggcgaggatataaatccggctgaacgtgtatattccaacgaatagcgtgaaaaggttgttgtaccatgcctcctctggctcgtggaacaagtagaaaagcttctttccatggaaacggtggttttctttcggttcgtttcgctcgtatttctcccggatattttggtttgtgcttcgtatgacgggtgagaccccgagccatacgattagggaaaataatacggataccagcgacgaataggcgaattgcttgagatgcccttttcccttaggctgccaacatacgttaatttgtagtagtatccgagtgaacaggatgaaaaacaggcattggaaggtcaataataatatactgtcgatctcggggtcgatccctctgatccgggatagctcgatacaatccatgatctcttcggaggtcacgaagaaacccgataatacggatacccatatcagtatggatggtttctgaaggagataatgttttattttcatggcttctctttttataggcaaaagtaaagttaaagcttgatataccctttcttttcctcctgttttcggatcatttaattttcgccctcaatcctttttctttcgctttggacggaaaaacaaaacttttggcctctccgagagtcatatttgcgtaataataaatcacgattgaatatgaaaactgcattgttttttaagcttttgttcgtttgtctagcgtgcgttgcgattcgtcccgtatcggcgcaagtactgggagctggtgtctttgagttgaaaggacaggttgtggactcattgacaaatgagccggtctcgttcgcgaccttgcgtgtgacgaggggtgaggagattacggagcctctcgctttattggcttgcgatattgacgggtatttctctgtctccttgcccgaggccggatcttattatttccatatgagttctatcgggaaaatacctgctcggaggaaagtgagcgtttcggctcaatcgcccgtatggaacgtaggtaaattatatatgaaagatgatgcccggacgctgggagaggtgagggtctcggcgcaaagacctttggtcaaggtggatattgataaattggtctataacctagaggaggatcccgaggcgaaagtcagcaatacattggatatgttgcggaaggtaccgatggtaaccgtggatggcgatgataatatccaactgaaaggaaatagtaattttaagatctacatgaatggccggccctcgggattgcttagtagtaatccttcggcggtattgaaaagtcttccggcctccagcatcaaggatatagaggtgataacagatcccggtgcccgctacgacgctgagggcgtgagtggaattatcaatattattatggtgagacgtgtcttggatggatatacggggacggtgagtgcggaggttaccgcgaacgaggcatacggcggcgggacatttgtctcgctgaaagctgggaaactgggacttacggcgaattacaatctggagtatgaacgtgagcctatagcggatatcacttccttccgcgagaacttatcggatgacgctaaccgttacctctcccagatcggggagcattgggaaagggagaagatgcaccggggatatttggagggaactttcgagatcgactcgatgaacctgattagcgtggacgccaatttgttccgcaagcgtcagaaagagttctcggatctgagcgtggagatgcgtgacatgaaccgagacttgatttatgcttacgatcgttttagccagaatcaacctgtcttcggctccgtggaggtgaatgccaactaccagcatgagacaaggcgtaagggggagttgctgactttgtcttatcgtttcaccaatgatccgaatgatgatgagaaccggatgcggataacgggtacctcgaattactctgatttcctgcaatgggacacgaaccgggcgaagaccaatgagcatacgggacaattggattatataagacccattgccggggggcatgatctggagaccggagtaaaatatatcttgcgccagaccgacagtgagatcacgcaacggctttatgatgagacttccggcaattggcatgaaccgtcgggcagctttgtggatttcagccatacgcaacatatttactcggtatatctgggtggcacctttcgttggaataagctgggaataaaggctggagtacgtgcggaaggaacgagcttggacgtgagctattcgaatgatctgacgaaagactttcattcgaattttgtggatatcgtaccgaacgttacgttgtcttactcgatcggacagtcgcaacagatccgtctgggatataatatgcgtatccagcgtgcgggtattgattatttgaatccttatgtcgacgagcgggatccgctaaatgtttcttatggcaatccagacttggattccgagaaaagcaatagtgtgaaccttaattataccttattcacccagaagtttaacataaatgccagcgtaagccatgcatttgtgaacaattctatcgagcaatatacttttatggatacggagcgtccgaacgtatcggtctctacctatggtaatatcggcaaacggcaccagacaggcttttccctttatatgaattggagccctgtcccattgttccgttttttcatgaatggtggcgtggattatatcagtatggaaaacgaggaaagaaacttgtcgaacagcggttggagcggacgtgctttcgccggtgtccaattttcgtttccgaaagatttccggctgaacatgaacgccggttatatgttacccaagattcaattacaagggaaacgatctgatttcctgtttcacggcattaccttgaataaggattttttccataagaagctcacgttttctgtctattgcaagagccctttgatgaagacttggaagatggagaataagacttataacaatgcgttcaccctttatgagacggagaataaggtgatgcgtgagttcggtatatccgtatcttatcgtttcgggagccttacggatactttcaggaaaatcaagcggggcatcgtgaacgatgacgtgaaggattgtgggggaaaggacgtcgattagtaacgatagtattatgattacgaataggtattcgaggacgatgtggattttgatgctgtttctctcacggctttttcatttaagttttgaattgggcgtacaatgcctctacgcatgccagtgcggcatgggcgagaatactattcttatagacatcagtcggggtggcggtctttatggagtcttcaagcccatagcgcaaagatctttgattcttgccgaagcggatatttccctacggaaaacctctgcaaaagcagacattcgatcagccatcttttcattgtctatgctttgaaacacacggcaaagcgtagtttccaagggtaacccatacggaaataactctttcgcctgcaggcgtttcaagtgacgtttgccaaattgaagcattttaattctacctacaaagataggtgcggaggaaggcaagctcacgctcttccttcttggctttcagccagtgggtgaaggtgtgcgtattgatcccccttcttttccgggtatccctgaataagaagaattttacaataagcagaaaatcaggtcgtgttttcaaggggttgaaaatcagagtcgtaaaaacatcgtaatgtttgcgtcgaaacacgtacatgtttttccgaaaagtcgtacatgtttttggatattcacgtacgtgtttttccggaaatgatattgatgtaaaataggaacattaaaaaaagacaataaccttaccttgtgagattctgtcacaagagatattccgggtatttgatggttagatcgatttgggtacggttctcctattggtatccgaggacgatgtggattttggatattttctattatctttgtcacttgaaagtgtattatcaattcaaaatgtaaataatatcatgagaaaattattgttagccttttgtgcgttcgcaacgatttgtagcgccggggcgcagtggaagcccgccggagacaagatcaagacggactgggctgagaaagtagatccccggaatgtattgccagaatatccacgccccgggatggaacgtgcggattggcagaatttgaacggcgagtgggaatacgctatccttccaaaaggacaggcagagccgacgagtttcgatgggaatatcttggtgccgttcgccgtggaatcctccttgtccggcgtgcaaaaagaagtgggggagaagaatgagttgtggtataaacgaacctttacggtgccctcctcatggaaaggaaaagatatcttgttgaacttcggcgccgtggattggaaagcggacgtgttcgtgaatgatatcctgatcggttcccacacgggaggctttaccccgttttccttgaatatcactccctatctgaatggcaaaagtacgcataagctggtggtgcgtgtatgggacccgagcgataaaggctaccaaccccgtggaaagcaagtggccaacccggagggaatctggtatacgccggtcaccggaatctggcagaccgtatggctggagccggtcgcttcctcgcatatcacctctatcaaggcgatcccgaatatcgataatggcgtgatgagcgtgacggtcggggcttgttccgactccccggtgtcggacatcgtggaggtcagcttgctcgataaggggcaggtggttgctaccgccaagggcgtacaagggacagaattacgcttggccgtgcaaaatcctacgttgtgggaaccttccaatccttatttatatgatatgaaggtgagcttgtcgaagaatggcaagaaggtggacgaggtgaaatcgtacaccgccttccgtaagatatccgccgagcgtgacgccaacggcatcatgcgtatgcgcttgaacaacaagaacctgttccaatacggcccgctggatcaaggctggtggcccgacgggctttacacggctcccacggacgaggcgttgctgtatgatatcgtgaagacgaaagcgtggggcttcaacatgatccgcaagcacgtgaaggtagagccggcccgctggtactatcattgcgataaggaaggtatgctggtttggcaggatatgcctagcggcgacatgggtaaccaatgggcgcctcatacgtataacggtggaaccgacaaggagcgtaccgaggagtctatccgtaattattacaaggagtggaaggagatcatggacctgtgcgtctcgaatcctagcgtagtagtatgggtgcccttcaacgaggcttggggccagttcgataccgagaaggctgccgagtggacaaaaacatacgatccttcccgtctggtgaatccggccagtggcggtaatttccgtgcgtgcggcgatatcttggatttgcataattacccgggcccggcgatgtacctgttcgatccggtgcgtgtaaacgtattgggcgagtatggtggtatcggcttggccgtggagaaccatttgtggtggaataaacgcaactggggctatgtacagtttaagaatagcgatgaggtgaccgccgagtacgtgaagtacgccaaggagttgaaggcgatggtcccgaagggtttctccgccgctgtctacacgcaaaccacggacgtggaaggcgaggtgaacggccttatgacctacgaccgtaaagtgatcaagatcaacgaggccgaggtgcgcaaggcgaaccaagaggtgatcaaggccttgtctgagtagaaggcttagaaaaaatagttatttgactcgatgatagatccggtccgggcaaagagagattctttcccggatcggattgttttagcgaaatgaatatgattcggaatgtgagtttgcgagacgccaaggcgatcgtggatatatacaatgaatatgtcgtgaatagcgtggctacgtttgagacggaacctttgcgggtggaggagatggagggtcgcatagccgggatctcggcgagctatccttatctggtgtacgtggatcaggatgaggtcgtgggatattgctatgcccatacgtggaaagaaaaggcagcttataaatatacgcttgagaccaccgtttatttatccccgagatacaagggcaaggggatcggccggcagcttatggaaaggctgatcgaggaatgtcgggcaggcggctaccacgccctgatcgcctgcatcactgaggggaatgaggccagctactcgctgcatgagaagctggggttcagaaaagtatcccacttcgagaaagtagggctgaaattcgggcggtggctggacgtggtagattatgaattgataattaagcctaacgagaggtaactttcgaatctcaattttcaattctcaattaatatacctatcttcgcgataaacaaaatgtaaagaatgaaatacaatacagaaggaaaaagattgactttgcccgaatacggacgcaatatccagaatatggtggactattgcgtgactatccaagacagggaagagcgtaagcgttgcgccaacacgattatcaacatcatgggaaacatgttcccgcacttgcgtgacgtaaacgactttaagcatatcctttgggatcatctggcgatcatggccgattttaagctcgatatagactatccgtacgagatcatcaagaaggagaacctgtatagccgtccgcctcgtatcccgtacaacaataaccgtatacgctaccgccattacggaaagaccttggagctgatgatccgcaaggccacggagctgcaacccggcatggagaaagaccagctcgtgcgactgctggccaaccagatgaagaaatcgttccttacttggaacaaggaaagcgtggacgaccgtaagatcttcaaggatctggacgaactctccggcagcaagatcgtattgagcgaggaggaacataaactggccgagagccgtgatatattggcccgtaataacagtggcgcccacaaaagaaactttacgcgtaaaggcagatgagctcgttcgttatagaaggtggttatcgcttgtccggcgagatcgtcccgcaaggcgccaagaatgaggcgctggaggtgatctgtgcgacattgctaacaccggagaaggtgaccatacacaatgtgcccgatatcttggacgtgaataacttaatccagctccttagggatatgagggtcaaggtggagcatccgtccgccgatacctatacctttcaggcggacgacgtggacatggagtatttacgtaccgaggagttcctgcgcaagagtggtagcctgcggggttccgtgatgatcgtaggcccgttggtagcccgcttcggcagggcgctgatcccgaaaccgggtggcgacaagatcgggcgacgccggctggatacgcacttcgtgggaatccagaagctgggcgcttgctttagctacgacgccgagcggcaagtatacgagatagaggcacgccagttgaaaggcgcttatatgctgctcgacgaggcttccgtgaccggaacggcgaatatcttgatggctgccgtgctggccgagggggtgacgacgatctataacgccgcctgcgagccttacctgcaacaactttccacgatgctgaaccgcatgggagcgagaatctcaggtgtcggttctaacctattgacaatagaaggtgtacggtcgctttccggcacggagcataccatcctccccgatatgatcgaggtgggtagctttatcggtatggccgctatgaccggatcggagatcaccatcaagaatacaggatatgataagctggggatcatcccggacgcttttcgccgcttgggtattaccgtggagcagcgaggcgatgatatttatatcccccggcatgattcctacgagatcgatacgtttatcgatggttctatcatgaccatcgccgacgctccttggccggggcttacaccggacttgctgagcgtatttctcgtagtggctacgcaatccgtgggaagcgtgctgatccaccagaaaatgtttgagagtcgcttgttctttgtggacaagctaatcgatatgggagcccagatcatcctttgcgacccgcaccgggctacggtgatcgggctgggcaaccgcttcaagttacggggctctacgatggtatccccggatatccgtgcgggtatcgccttgctgatcgccgccatgagcgccgagggcaccagcacgatccataatatagaccagatcgaccggggatatcaagggatcgataagcgattgaaccggatcggggcacgtatcacgaggatttaaagattttaggcgatgattagagaagaagaggttttcaagatcgggcagtttgccaagccccatggcatcaagggggagttgtcgttggtgacgaatagcgatgttctggaagatgccgaggacccgtacattgtttgcgagatggatggtatcttggtaccgttcttcgtggaggatttccgctataagaccgatacggtggtcttggtgaaactggaggacgtgaattccgaggaggatgctcgtatgtttgtgggcaaggaggtgttttatcctttggacgccgtggacgaggaggatctcgtgggggatatgacgtgggacagttttatcggttataccgtgacggacgtacagaaaggctatttaggagagataacagacgtggatgagacgacaatcaacgtccttctgcgtgtcgatcataaaggcgaggagctgttgatcccagccgtggaggagttgatcaccgaggccgatcatgaggcccgtagcctcactgtgtctttgccggagggactgattgatttataattgagaatttataattgaagattaggggttgaaaaagaagaatacgaaatcgttttggcaccggatccggtttaaatataaactttccttcatcaatgaggggacgttggaggaggtgtggtctttccggctttcgcagttatcggcgtttgtcactttggcggtgttcgcctttttcttgatcgccgttaccgcttttatcatcatcaagacaccgattcgcaactacttgccgggttatctcgacgtggaggttcgcaaggagattatgcagaatgccttgcgggcggattcgttggagcgtatgatcgagatccagtccctttatctggataacgtggccggaatcatttccggtacgatgcccttggactcgatccgccagatagattctttggctagcaacgatattaactatgagattcctcgtagcaaggaagagactcgcttcgtgaaagattacgaggaagaggagaaatataatttatcggtattgaccgacccgggcaaggtcccgaccgagggggtctttttctataagcccgtgaatggcgtggtcacctctcattatgagacggatgtccatcattatggcgtggatctggccgcggccccgaaggagagtgtcttggctacgttggatggtacggtgatctataccggtttcgatccgaaccacggaaacgtaattcaattacaacataagaacggattcatctcggtttataagcacaacgaattgttgctaaaagaggtgggagaccatgtggtagccggtgaggcgatcgctttggtcgggaatacgggagagttgtctaccgggccgcacctgcatttcgagttgtggtataagggcaatcctgtgaatccggaagaatatatagctttttgatattccatgaaaaaaagacagttagcgatattaggctcgaccggttccatcggaacccaagccttggaggtagtgagcgagcattccgatcttttcgaggtgtatgccttgaccgcgaataaccaagtggacttattgatcaatcaggcccggaaatatatgccggaggtggtggtgatcgccaacgagcggaaatatcccgagctgaaagaggccttggaggacttgccgatcaaggtatgggcgggtgccgacgctatcgcccagatggtgcagtcggagccgatcgatatggtgctgacggcgatggtgggttattccggcttgcgaccgacgatctcggcgatcaaggcgggaaaggcgatcgccttggcgaataaggaaactttggtcgtggccggcgagctgatcatgaagctggccgccgagcataaggtgcctatcttgccggtggactcggaacattcggccatttttcaatgtttaacaggtgcgtacgataatccgatcgagaagatcttgctgacggcttccggcggtccgttccggcggaagacgctggaggagctggctaccgtgacgaaggcgcaggccttgaggcatccgaactggacgatgggggcgaagatcacgatagactcggcctcgatgatgaacaagggcttcgagatgatcgaggcgaaatggttgttcgatgtcacgccggatcaggtacaggtggtggtgcacccacagtcggtgatccactcgatggtgcagtttgaggatggcgccgtgatcgcccagctgggaattcccgacatgaaattgccgatcgcctacgctttctcgtttccgacacgtatgaggagcatggcgccccgtctggattttaaccaatattcgactttgacgttcgaggagccggatatggaacgtttccgcaacttggctttcgctttcgaggcggcccgccaaggagggaatatgccctgtatcttgaatgccgccaatgaggtggtggtggctgccttcctgcaagatcgtatcggcttcttgcaaatgagcgacgtgatcgagcggactatgcggaaagcctcgtttatcgtcaatccctcgtatgaggattacgtggctaccgacaccgaggctaggcggttggcggccgagttattttgaaataatttaaaacagaacaaacaatagtagatggaaacttttttgattaaggcgttacagctcatcttgagcttatcgatactggtgattgtccacgagttcgggcattttatcttcgcccggattttcaaggtgcgggtagagaagttctacctcttcttcgatccgtggttctcgctattcaagtacaagccgaaaaacagtgacacggaatacggtgtaggctggcttccgttgggaggatattgtaagatctccggtatgatcgacgagagtatggacaaggaggcgatggcccagccgcccaagccttacgagttccgctccaagccggccggacagcgtttgatgattatggtagcgggcgtggtgttcaacttcttgctggctttgtttatttattccatgatattgtttacgtggggcgatacgtacttgcccttgaagaacatgaagatgggtatgaattatagcgagacgttccagaacgtcggttttcaggacggtgatatcttgctgagagcggacaatgaggagttggagcgtttcggtagcgacagtttccgcaaggtggtggaggcaaagaccgtgacggtgctccgtgacgggcgggagaccgtgatctccataccggaggatatgatgcaacgttgcatgcgtgacggaaaaggcttcgccgatcctttgcgtatcccgatggttgttcgtgagcttcccgacaagaatgccccggcggctcttgccggcatgcagccgaaggatagcgtggtggctattaacggtgtggctaccccgacgttttatgatgcctctgggttattgtcagagaataagggtgaagaggtgacagtagatttctaccggaacggccagttggagtccttgaccatgaggacggactcggccgggaaaattggcgtagcggtgatgttgcctacggatctctatcagaccgtgacccgcaaatacggtttcttcgagtcgttccccgccggtattaaattaggtattaataccttgaagggatatgtgaacgacatgaaatatgtgtttacgaaggaaggtgcctccagtttgggcggtttcggtacgatcggcggattgttcccgtctgtctgggattggcggattttctgggaacgtacggctttcctatctatcatcttggcgttcatgaatatcttgccgattccggccttggatggcggacacgtgatgttcttgatctatgaggtagtggcccgtcgcaaaccgagcgataaattcctagagtatgcccaaatggcaggtatgtttatcctgttcgctttattgatctatgcgaatggaaatgacatcttccgcttcttcttcaagtagcgtatgtctctacagctagatacaaaaaacctcccggatcacttttctatgtgatccgggaggtttttttgtatgaataaagtcctctttcttatttcaggatgtcgttgatagaagcgaggatcttcttggagttctcgtctttcgggtcgagttcgactgcctttgtcaaatattctttcgcttgcttgaaatctttgtcggctttcgctttctcggcgttgtatttatccggctcggaagtagcgatcggggtagcggcctgtaatatcttcgctccgttgccatacagcatggcgccaaggctgtagtaagcgttgctctggtaatccttgttcgatacggctaggacctctttgtacattttctcggcaccggccagatctcccttcttttgggcggcttgtccttgtttgatgcagtaaccgtaaagcaacttttccagattggtcttattcttgtttccatcgggaatcacttttaatccctcttttaccgtagtcaggaattcttctgtcttgtttaagttacggtaagccatggcctcgcctacataagagtcgtctacgttgtagttcatcttaacggccatgtcgaaatacttggcggcctcggcgtagttcttcgcttgattagcggcgtatccgcaattgaagatacgggccgtgtcttggtaattgttttgtttcaagtattcgccgtattttgttacgacggtagcgtaatcttttgctttcaaagcagcgtcaccttcatctcttaatttgtcagcgtcttgtgcgaataggtttccgacacataggcataaagccactaataaaacaattttcttcatggtaattattaaatttgattgattttgtgctctaagttaaggcgtgcgggaaaagaagccaagatattttacgttttttagaaaacaataaaaatagaaaacataaaaaagggattgcttacggcaatccctactgatgaaagattctttgaaacttatgctttgagtgaaggaaaagcctcagccacggcggggtagacaatctttccttccacgatgtttaatcccagttctaggcccggatcttcttcgcaggctttttcccaacctctgtcggcaagcttgatcacgtacggcagggtagcgttggtcaaggctaacgtggaagtctgcgggaccgctcccggaatgttggctacgcagtaatggaggatatcgtctatctcataaaccggattggcgtgcgtagtcggatgggaggtctcgaagcaaccgccttgatcgatggctacgtctaccaatacgctgcccggttttaataacttcaacatatcccgggtgatcaagtgcggggccttggctccggggattaatacggcgccgatcactaaatcggttgtgggtaattcctgttcgatcgtatgcgtggaagagaacaatgtcttcacgtttttcggcatcgtctcggacagatagcgcaagcggggaagcgagatgtcggcaatcgtgacatcggcgcctagcccggcggccatcaaggcggcgttgtggcctaccacaccaccgcctaaaactaataccttacccggtttcacgcctggcacgccacctagcaatacgcctttgccaccttgcggtttctcaaggaaacgagcgccttcctgtacggacatgcgtccggccacctcactcataggaatcaaaaggggtaacgtatgatctgggttctccacggtctcgtaagccagacagatggagccgctctttatcatggcaagggtgagagcctcgtcggatgcgaaatggaagtaggtgaagacaagctgtcctttgcgtaccaagggatattcgctggcgatcggctcttttacttttacgatcatttcggcaattccatatacatcctcaatggccgggagtatccgggcccctgccgccacataggcgtcatcggcgaaaccactgtttataccagccgtgtgttgcacatacacggtatgacctcttttcaccaactctttggctccggcgggagtaagagctaccctgttctcgttgttcttgatttcttttggaattccaataatcataatggtagcatttaatgggtttatatgcctgcaatatacaaaaaagaggaacagattggtattctgtccctctttttttatcttatttcttgttccttataaaccttgtccgtggcagttcttgtatttcttgccacttccgcaaggacatggatcattgcgtcctactcgtttctcggcacggaccggagcttgcttcggttgaggtgcctcggcttgggtgttgtttccgctcaagtctgttttctccgtgcggtaacggctcatatcctcgtgcttctccggggcggcctcttgtacggcgatacgttgacgggctctttcctcggcgatcgcttgggctgcttgctgggctacggccgcttgacgggcttgcatggcttggcgttgctcctcggtcggctcctcacgtaccgggatctgtccacgcatcaagatggcggctgtcttacggttcatgttgtctaccattgtcttgaacaggttgtaagattcaagtttgtagatcaacaaaggatccttgttctcgtagctagcgttttgtacggagtggcgcagctcatccatctcacgtagatgctctttccatccctcgtcgatcatatgcaatacgattgatttctggaaggatttaacgattgccttacattccgtgtcgtaagcctctttcaggttgcaagatacattatacatgcgcttgccgtccgtgatagggatcatgatattctcgtacatcgctccttgattctcgtacacttgcttgatgaccgggtgagcgacttgcgtcatgcgttccatacgacgtttataagtcttcaatgcctcctcgaacaatttctctacgagttgctccggtttcatgctcttgaattcgtcttccgtgaacgggctttccatggcgaatgtcttgaacaattccaacttgaagccctcgaaatcctcggcgtgttgatcggcgatagctgtagaagtatcgtaaatcgtgttcaatacgtccagaccgatacgctctcccatcaaggcgtggcgacggcgggtgtagattacgttacgttgtgagttcatcacgtcgtcgtattccaacagacgtttacggataccgaagttgttttcctctaccttcttctgggcacgttctacggacttgctcaacatattgtgctccagaacctcgccttccttgaaaccaagcttatccatcaagccggcgatcttctcggaagcgaataaacgcatcaagtcgtcttccagtgatacgaagaatacggatgaacccgggtctccctgacgtccggcacgaccacgtaactgacggtctacacgacggctctcatggcgttccgtaccgatgatcgccaaaccgcctgcgtctttcacgtccttggacagcttgatatcggtaccacgaccggccatgttggtagcgatcgtaaccgtactcttttgacccgccaaggccacgatctcggcctctttctggtgcaacttagcgttcaatacattgtgctggatcttacgcatcgtaagcatacggctcaataactcggagatctctacggatgtcgtacccaccaataccgggcggcctgcctccgtcagctgaacgatttcctcgataacagcgttatatttctcacgttttgtcttgtagatacgatcgttcatatcgttacgggcgatcggtcggttggtcgggatcactactacgtccaatttgtagatatcccagaactcgcctgcttccgtctccgccgtaccggtcataccggataatttatggtacatacggaagtagttctgcaaggtgatcgtggcgaatgtttgtgtagcggcctctacctttacacgttccttagcctcgatcgcttggtgcaggccatcggaataacgacgtccgtccatgatacgacccgtctgctcgtcaacgatcataaccttgttgtccataaccacgtactcatcatccttctcgaataaggtgtaagctttcaacaactggttgatggtatgtacacgctcgctcttaacggaatagttcgccaagatctcgtccttttgagcttgtttctcttcctcggttcctgtcatgttctccaattgagataattgggacgtgatatcgggaagtacgaagaaggtcgggtcgtccgtcttaccggtcaataggtcgatacctttatccgtcaattcgatactgttgttcttctcgtcgatcacgaaatacaactcatcggtcgcctcgtgcatatggcgcatattctcggacatgaaatattcttccgtcttcaacatttgagcttttacgccttgctcgcttaagaacttgatcaacgccttgttgcggggatatcccttgaaggagcggtacagaaggatagagccttcctcaacgaccttctggtcgtcgctagccattttcttcttggcctcgatcaataatttggagcaaaggtctttctgcgcgttcacgacaacctccacgttcgggcggaattgctcgaataattgttcctcgccacgagggatcggtccggagatgatcagcggcgtacgagcgtcatcgatcaatacggagtccacctcatcgacgatggagtagttatgcttgcgttgtaccaagtctttcgggctgatcgccatattgtcacgcaagtagtcgaaaccgaactcgttgttcgtaccgaacgtaatatccgcctcgtaagccttacggcgagcctcggagttcggctggtgcttatcgatacagtctacggaaagtccgtggaacatataaagcggtcccatccactcggagtcacgttttgacaagtaatcattcacggttaccacgtgtacaccgttacgtgtcaaggcgttcaaaaataccggaagggtagccaccaaggtcttaccttcaccggtcgccatctcggcgatcttacctttatgaagaacgacgccaccaaatagctgaacgtcgtaatggatcatatcccatgtgatctcgtttccaccggctttccagtgattggcgtaaatcgccttatcgtcctcgatgcggacaaagtcgaaacgagcggccagatcccggtcgaattggttagcggtaactaccacttcctcattctcggcgaaacggcgggccgtatctttcatgatggcgaatacctcgggcaaggattgctccagtaccacttccatcttgtccgtaatggctttctcgattttatctacctcggcccagatcgcctcacgttcttccagttccttatcctcgatgcctttgcgaagctcttccacttgcgctttctcctcggctacgtagtcctggatacgttgtttgatctcatctgttttcgcacgcaactcgtcgttcgagagtgccttgattgacggatatacggcctttaccttatctacgtaaggtgtgatttctttaaggtcacgctgcgacttattgccgaacagcttcgtcataaactcattaaatcccatgattcttatgttaatggatagttgagcaactatcgtctgttattactttgttgtttgaataattagataataataaatagaaagaagagccacacaacccttgataattatcaactttaataatcaattctctattatttggttgtcagctcccaaagcggtaggctttgagtagcgtttggtggcctgattcttagcacatgggttaccgtgggggctacctcagtggccttgactttgcggtagatatgttggggtttcaacccgttgcccataaataccagcggggtgataacagcattattgcgtataatcttgactttttctttcggattgtcgaggttcactttccaaccgggttgcaactcgatgatcagatcgccccgtctcaaatggtgcgtaccttgacggaatttggcggttccctcgttccagtcgcccgtaagcaagcttctgcccgtggtgacgagttgtacgccactaaattcctgtatgaattcggcggccttgttctgtaaagtcgtcaaatccagcttggcgtcttctatcgccttgcggttcaagtagatctggttgttgtagtatccttgtacccaactggtatgttggccgtaaatggccatcaagtacatattaagcagggccagacaacgtttcgggtggaactcgccaccgttcaccatcaggccgtccggataagactcctcgcttttataataaccggaaccggtgaagactaccaatgtattggccaagcccactttcttgtcgatcgtatccagtagcttctcgatatcttgatcgagttgataatacgtatcttgaatctcccgggtgtattccttgctcatcgtaccccggtaattgcccgcgtagtacgtgatagacaacatatccgggcaactgcgtgtaccaaaccctccgtactctaggaactggagggccaagcgattgatctccttattgatgaacggagaggtctttaggttcggatagcagttcgcgaacttctcgctgaacgtatagcggaaaggaagatcatccaatacgtaaggaaaggcatcgtatttctccatcggaagggtaggagtccataccatggtttctaagcgtgacgccaaggattccgggccgttattatagcggtctacgtaccaagggattcccttgtagtacgtcgtggtagcccacttcccgttggtgttatccatccagaaagctccgttggccgcatgtccggcggaaaggatggcgctctcggcatccggggcgatggaatatacgtcgcttcttccttgagaggcgattttcaactcgtcgccgatcgtggaactgaataaattcttgggcgaataattctctttcgtgtaattacccagatattcaggatcatttaagatcgagacctctttctctttctcgaaatcaaacgtcttatctccggcgataccgctgaagcaagggttgcttccggtaaaaagagtcgcgaacgcactggcttggtctatgtcagagaactcgaagcggatattgttatacaccaacccttcgttcatcaaacgcttgaagccccgttcgccaaatgtattataaaagtattctatatagtcgccccttagctgatccacagtaatacataccaccaatttgggggtacgctgctgcgcctcaaggtttgttaccacgaggatagcgataagtgacgttataatttttctcatccgattctccatatctttctgtaaacaccccaacccgaacgaacccaaatcgaggctacaagcggaataaaggcactgtttagatgttgcggaatgaaatgccatcccagtaacatcagcgtaagcgccgcaaagttaataaaatgatagtaatatgcagccttcttcagcttttttacgcaaaacaaaataacagcgatcaaatcgagcggctgtaaccataccaaagaccagttcggccacgtgcagggatggacggatatgaagctaagaaagaagaggatgacacctccggctccggctaccgagaaaaggacacaatccacccacaggaagtatttttttttgcgccattcgatccaagtaagccctaaaacgattccgaacagaagccaagcgcagactaaaggggtgaataaatcccagatatctttttccggctcgtcggcttccccggctccgatcacgtgggtctcgctcaccaatgggcggattgtcccgtccgggcccgtgatggtggctttagagaacgcttcttttagataaggggggaggaagagcatctcgtgttgggtggcctcccggtcggtggggctgcctagcgctaggtcgcatccgaatgtgagccacggatggtttcgggtacaataattaataagatcccggaaggtctgggattgatagggatactgataatcgacgctcccgttgatctccttttccaagatcgcggcagggcgggtagcgcaattatcgaagaagaagttataacgatataccctgttctccggcctgtaattaataagcagggcatcccatatatgttctttctcttcttgggtgaggttcaatacttgttccgtgatatcgctgccccgcatttggtactcgatcacgtagtcttggaaatcggctactcccagtttataatccgtctctcctttagcgaatcggtagataaaattaggtttggagaaatcaaatataccgtaattgaatatataatctatattttgcttgggatcgtatatgcgtagagcggcatgcccgtacacggtgaatacctcttcatcgtacggtgcgctggtcatcagactgatacgggcttcctcgctcagtttgggttgcgccatcgccgatagggaaagaatccccagcaggaatagaaatatgctttttgtcattctcttcttgattatttgacgcaaaggtagattatttttcttaaacagtatagatcgtttaagcataacatatggctttatgtcgagaaaagagatagctttgtttttattataaagggaaaaggaaacttggttatgtctttgattataagagtgttgcagttttttgcggatttttttttaagaaactttagtttcttctagggaaaacaaaagttttcctatgaggaaacagaagtttcccttgcacaaaactctagtttctagctagagaaacagacgttgcttttagaaggagcattgaggagataaaacaaaattaggcgaccatccttatttggataatcgcctaatgcctgatagagcggtaggcgaggctcgaactcgtgaccctcagcttgggaagctgatgctctaccaactgagctactaccgcattgcgagtgcaaatgtatacaaatctttctttttttagtaactttggcgagaaaattttataaaaaagaattaagtatggaaaaactagtcttgataaaggtaggagggaagatcgttgaggaagaagaaacgcttcgtcaattattgaacgatttcgctgctatcgagggatataaggtcttggtgcatgggggaggacgctcggctaccaagcttgccgcccaactagggatcgagagcaagatggtgaacggtcgccgtattacagatgccgagaccttgaaggtcgtgacaatggtctatggcgggttggtgaataaaaacatcgtagcgggcttgcaggcgttgggcgtaaacgctttaggattgactggtgcggacatgaatttgatgcgctccgacaaacgtcccgtggcagaggtggattatggtttcgtaggcgacgtgaaagaggtgaatgccgatttgctagcctctcttatccatcaaggtatcgtgccggtactggctcctcttacacatgataagcaaggccatatgttgaatacgaacgctgatacgatagcgggagaagccgctaaagcgttggcaaaacattttgaggtgacattgatgttctgtttcgagaaaaaaggcgttttgttggacgagaacgatgatgagagcgtgataccggaaatcgatcgtatagcgtttaagggatatgtagaacaaggaattatccaagggggcatgatcccaaagctggaaaacgcttaccaagcgatagacgccggggtgaagcaggtgattattacgcaagcctcggagattcaccaaggaaaagggacgagagtcttttaaataaatgaggggctgtttatagcccctcacgtacattatataataggtctatcaaagactccgaatcttgatattacggaaccagattaatgaatccccatgttttccttgtaatccgataaatcctttggtcggtaattcggcgaaaggtttgggcaaccaacttgggatatcgcttccatccgggttcttggtgccggaagtccatttgctcatatccatttcggtaactttctttccgttgaggataaccatgatatgttgtccggcgcatttgatacgcatatgattccactccccgggttttttgacaactttgtcttgcacggcgcctagatgtccgtaaatggctccgcatttctcatacggcttgccgtttccccatttttcacaatggtcgtccgctatctgtatttctaccgagttgggtatccaatccttcgtgtccgtacagtaaacgactactccgctgttcgtgcccacgtcggtcttaaaatcaagatccagctcgaagttctcatattcatcctttgtccagatagactcgtccttcacggcgcctaacacgccatcagtctcgctccaaacttccggattgtagttggcgttttccagatttttaccgaagagaggcttccatttattgttatccgccgcgaatgaggagaatgtacttgccacacaccataaagtagccatggctaaaagaaaatgtttcatgctattagttttaaagatttacgtaaggcaaatgtattcatttattttggaaggaacatagtctacgaagaacgattttatttacaagtgaaagcgaaataggttgaaatgctatgattcttaaggaaatcttcttttttttatcaaagatcaaatagtttgttaaaatgatattaaaatcttgtataatctttattgttgtaaaatagattaactaaaaaacacctattgcttgattggttttgtgttattatgatattacttatgtgtcaaaatatacatttaataggtctggaaatgacgttatgaaatatatttgactgttttaatgacacaaaatcattgtattatttgtttttaacagaaaatattctttatatttgcagtgtgaggattaggtgtatgtgtgattgtatgtaaaagtaaagtaaatattttaatgtaattttatatatatgcatgtataatcctgctgttttaaactaagttcttcgtaaactatggtaagttatgtgtgaaatttgatttaaataattaattgttaaataaaaaagtgtgtttatgagaaggttgacttttttgttattatgcttgtttataggcataggagtcgcaacggcacagacgatgaagataacaggtaatgttatatcatcggaagatcagcaacccgtgatcggtgcggctgtcgttgtgaaaggcactacgattggtacggttacggactttgagggaaactttagtttagatgtaccgagagacgctaagatgatctttatttcttatgtaggattgaaaacgaaggaagtacctgtggcatccgtgatcaacgttgttttggactcggattcaaaagcgttggatgaggtggttgtaaccgctatgggtttgactcgtgagaagaaagccttgggttatgccctgcaagaggtgaaatctgatgagttgacaaaagctggccaacagagcttggcgacctcactttccggtaagatcgccggtgtgcagattacttctcaaggtggacaggttggtgcgtcgcagaatatcgtggttcgcggtaattcctcttttggtaataaccaaccgttgatcgttgtggacggtgtgcctatcgctaatgataatgcgaaaggtgccactgtaaacttgggttccggcttgaatgatattaatccggaggatatagagtccatctctgtgttgaagggtggatctgccgctttgtatggtatgcgtgccggtaatggcgttatcttggttactactaaatccggtaagaaagacaagggtgtatctatctcttatgagggtgatatcacgattgaccgggtttataatttgcctagattgcagaataagtacggacaaggctattacgcttccgagtatgattggaaggaagcgcaagcggggggatattctggcgattatcaaacttttgccttggagaatggttacaattatgtagatggtatgggtagtggtatcaacgataacgcggatgagtcttggggacctcgcttggatatcggattgaatttgccgcaatacaatagcccggtgatcgatggcgtgcgtcaggctactccttgggtttcctgcccggacaatatcaagaatttcttccaaacgggttattcaatgaatcatacggtggctttgtctgcctctacggataaaacgtctacacgcgcatctttatctttccgtgatcaaagcggtacgaccccgaacactgatcagaagcgctatgctatggcggtgaacacgaaaatgacgtttaataagtatattgatttcgacttgtctgcgaattatattcgcacgaaaagcgcgaacttgccgggtacgggatataacagtacgaatgctttgcagtctatcatgcagtggtttggtcgtcaagttgatttgaaggatttgaagaataattgggatcaagtggatgagtatggaaaatatacgcattataactggatacagtctttccatgcgaatccgtattggacattgaataagaataccaatagttatgatcgtaatcgtttctatggcaagacctctttgtatatcaaaccgaccgattggttaaagtttgaaggtcgtatgggcttggatcattacgattctaatcagttctctcgtattttatggaatatcgactatccgaatggatatttccgtagcttcgaccgttcgatgactgagtttaacgcggactttatcgcctacgtgaacaagaacttcggtgattgggccttgaatggtttggctggagccaactatcgtgattatcaaacagctatcatggggacaggtgcggacgaattgaccgcagaggggttgtttaccgtagcgaacgctcatggaaccccgtacaccttgaacgaccatgagaaacgtcgttcaaactctgtatacgctaatgcctctatcggctacaagaatatggcttatgccgaggtaagtgtccgtaatgactgggactctacgatcaaggacgctttcttctatccttctttcagtggtagctggatcttgaccgagacattccccggattgcaaaatggcgattatttgaatttcttgaaattgcgtggtggttgggcaaagatcggttccgcaacggacccgtatcgttcgaacgcttattattcattgatcagttcttcgttcaatggtactacattgttctataatccgacaatccttcctcctacaaatcttcgtccggagagcgtaaagacttgggaagttggtgttgaggctaatttgttcaacaatcgtttgcatattgatgccgcatattataataaggtgacgagcgatcagatcatgaatgcgaacgtggctacctctactggttatacctctatgtatatcaacgctggaaagatcagcaacaagggtgtcgagttgcaggtatccggtgatatcatcaagaatccgaagggattcaactggacggctacgttgaactgggcgaaggataagagccgaattgatgagctttatacagatcccgttaccggacagtctttggacgcttaccaaatcggtagtagctggagcgtgaagaactatgcgatggtcggtaagagttggggtactttggtaggtacaggttacgtatataatgaggatggctcgatcttggtagaggatggtattcctgtctacgaggccggaaaagagatcggtgatgttacgccgaagtggttggctggtttcagcaatgagttctcttataaggattggagcttcggtttcttattggatttccgtttgggcggtgacgtatattctgttacacaagcattcggttctcagacgggtatcttgaaacacacggcagaaggcgatttgcgtgagaatggcgtcgtacttggccagaattatatgacggacaaggtcttcaagactgcagatggtaagattaatgatgtcgctgtcaatgcggaggacttcttctataattattatacgatttgtgagatgtctgtattcgatggttcttacttgaaattgcgtgaggctcacctgacgtataatttcccgaaatcaattctagagaagactaaatgtatcaaggccgctcatgtatcattggttggtacgaacttggcgttgctttgggtgcataagtcaaatatcgctcatattgatccggagtctacaagtaccggtggcgatgaccccgagactacggctacaagcagaggatttaactctggtgtaggttttgagtccaactcttatcctccttctcgtagctttggtcttaaattaggtgtaacattttaatcaacattaatctgaggaatttaatatgaaaagatatatcaagaatttcatgatggctatgatggtcggtgctactgtattcggtagctcgtgtaccgattcgtttgaggaggtcaatacagacccggatagccctacggatgtgcctacgacgaatcttctggcgtattctttatattacacatcctatcgtctgtatgatcggtggttcgcgatggatgagccgatgactttctgcggatatgcttcgaagatgacttatatcgacgagtcccgctataatttccgtacgggtgtacaggatacgaactgggagtatttgtatcgtatattgaataacctaaaagatatcgagaagcgtgccacgtttaatgagactcctaatatgctgaacgtatcgaaggttatgcaggttcatttgatgcaggtagccacggatcgttggcgggatgtcccttatacggatgctgctaagatgacagatggggtcttgcagccgaaatacgataagcaagaggatatttatccgggcttattggctacgttgaaggaagctgcggatggctttgccgatggtggtagtgatgacttaggcgagggagacttgttattcggtggtgatatcgagaagtggcagagatattgtaattctatgcgtcttcgtttagcgatgcgtatctcagaggtttccccggcgttggctaaggagaccgtagaggaagtcatgggtaatctcactaagtatccgatcatggaaagcaacgatgataatgctttcttctggtggatcggaacagaccccaactattacgaaccgatggcagacggttatcgtacacgtaagacggagtattgtgccgcagacgtgatcgtggatcatatgaatacacgtgaggaccctcgtcgctcatcttatttccaacccacaaaagaaagtgtggaggccggtgagcctaagtatgtaggttatacgatcggggcgaaagcgaatgcggtagcttctaaatattccatttggggagcacgtttctttacggacttggctggtttttctccttatatgcgtgtcgctgagccttggttctgtgtcgctgaggcatctatgttgggatggaataccggaatctccgcagaggacgcatacaataaggctgttacctattccatggaagagaatagcgtatctgccgaagatatagcggattaccttgcgaacgcgggtaagttcacgaatgataagaaacagatttattatgaggaatgggttgccatgttcaagcaaggaatggaaggttggtcattgtatcgccgtacaggcgtgccagacaacttgtatccggctccgggccgtccggcaaactattctaatcataacgtacctccattccgctctccgtatcctgataaggaacgtaatttgaacaatgcgaattgtgctcccttcgatgcggaagtcgtggataatttgtggggtaaacaaatgtggtgggatacacgtacaggcgttcattaactactagttaacatagacataccaagtgcctgtatactatagaggggctgctcgtgatgagtggcccctttttttgtcattatgctgtcattttttaataaactatgtatctttgtccggcttatttagaaaaaagatggaaaaagaaggaatgatggtggtcgatattaagaatatcgttactcgtttgccggaattgcggtttacggcacccgtgaattggagaattgatgaaggacagcaatgggctgtaatcggtccgaatggcgctggtaaaaccttgatagcggatattatgcagcgtaaattcgcttttaaggaaggtgaggtcgtgttctccggggatggtaaggtgagtgactttatcaagagcatagcgtttaaggatatttattcgttggcggattgccggaattcttattaccaacagcgttggcattcgacagagacggaggagatgcctattgtcgaggaattgttgaaggaatatgccggctctgataatttagcgaagatattgactcttttcggtatagaggatttattgcctaagcggttgatcttcttatcaagtggtgaattacgaaaattcttgattgtccggacgttgcttagccgtcctcgtgtcttgatcttggataatccttttatcggcttagacgctccatcccgggatttattggtagagatgctggggcaaatgacaaaattgaatggcgttcaagttgtcttgttattatctaaccccaatgacataccggcaatgatcacgcatgtattgcctatccatgatcgtacttgcctgcctccgctgactcgagaggagtttatgtcggatacggaattaatcgcccgtctttttccaacggaaggcattcatgcatgcgaggaagttggtaaggttcgtttacctgtggatatgaacaagatagcctctttacatgaggtgactttacgcatggagcatgtgaaaatacgctatggtagccgtacgatcttgaaagatttggattgggaaatcaagaacggggagaagtgggcgttattcggtccgaatggcgctggtaaatctaccttgctgagtttggtttacgcggataatccccagtcgtatgcgaatacgttgtatttgtttgatagaaagagaggttccggggaaagtatttgggatatcaagaagcgtatcggatatgtatcgccggagatgcacttatattataaggagaatgtccctaccttgaatattgtcggttccggctttttcgattcgatcggcttgtttcgtaagtgtaatgcggagcaagaaacggtagccttggagtggatgaaagtttttggcatcgaacatttgaaagaccgtttattcttgaccttatcatcgggagaacaacgtttggctttattagcgagagctttcgtgaaagatcccgatttaattatattagatgagcctctccacggtctggatgtgagcaataagaaaaaggcggctgctattatcgagcaattctgcgatcgcccgggaaaaaccttgatttacgtaacccattacccgcatgaattacctgcttgtgtagacaagcggttcgagctagtgaagcactcgtgagcgtacaaagaaaaagaggatgtgccgtggtgaagtggcacatcctctaaaatcaataaatacttatggataaaggattaatatcctgggttctgtatcaactgacctcttgatacggtgatttctccgataggaattgccatgatcgtacggtaatcgcccggcttaacctcacctacgaatttattgttgacagacttgccgttacgccaagcgtcccaagcggtatgtccttccgtgaataattctaggcgtctttccagtaagatatcatccaacgtgatagaagcgacatcggtataattctcaatacgattcttgcgtaacgtattcatatatccggcggccgcggaggtatcccctgcttttagtgcggcctcggccgctattaggtaaacttcggaaaggcgcacgacctttggattgtttacatagatttgcccgtcacgtcccttatacttttgcggataggtcccgtcatagccattatcggtctcttttgcgaataattccgtacggatatctcccggatgcttagccagctcttccaggaaagattcagtagcggcacattcaccgtagccggaggcatgtgtaaaataaccgatagagttacgttgcgcgttataatttggggtaactaagatctcgaatatagcctcgttcgttccttccttatcccatgcgcctatatattcatcccgtgtgtataacttataaggagaggaagcgataatctccttacagtcagccagtgcctctttattcttttctaagtaaaggtaagcgcgtgcgcggatcgctaaagccccccaataattgatgtgtccggtttgtttatctttactcaaaagaggcaatgcggtctcgatatctttcaatatctggtcgtatgtctgctgtaaggttgcccgggtcccgatataatccgtgggataaacctctgtggagagtacgatgcccagatcgttcatatctgttgttgatggtaatttagcgaatactctggctaaatcgaaatgatacaaggcgcgcatagcgtatagttctcctttcaatatgtctacatccgcaccttcaagattctcggcggcggctaatacattattaaggcgagctagactattgtagaataatttatagaaactataaaccatctcatcgtttttacctgtttggtaacgatacatggggccggcatgattcaccgtggagatagattggaaatccccacttcgtaaatcggccagcaatgtgaattccgctccatacgagcctacctctgtagcctgttgctcgtatacgccattcacggcatttgtcaaatcggctacggaagagattgcgtctatcgtaggtaattgggtagatgatgtcttttctaggacatcatcgcaggaggccgttaataaggcgaacgctagacctactaaatatatctttttcatatagattctattttaataaattataatgtgatgtttacaccaaagacaaagcttttagagaccggggtatctacctggcgataaccattcaagggaacatccgggtcgatgccttttgtctttgcccagatcatgaacggattattcgcacggaagtacacacgcagattactgaatatgtttttcaataccggtacattgtatcccaaggtgatttcacgcatacggatattgtcagaagatacgatggtacgactggagaagcgatccgagcgatatggattctggtagataggcttcgggtataaggcgttgtcgcccgggttcatccaataattacccgctacgctcttttctaggttgaatgaacctaaacggaatccgtcatgatggaagaagtagttcggataatcgaatatatcgccaccaaattgataggtaatcaagaatgaaagatcgaaatcatataaccggaacgtgtttgtcaaacctcccgttacgtcgggaatggctttgcctacgattcctttttcagcctcatcgtacttgttcactactcctttgctatgatcgtttggatctttccagaattctcctagtcctgtatccggattcacgcctttccattccggcagatagaaagtatacatggattctccctctcggtgcagatacatatcgccgtctccatattcgatgtcgttatggttcggcaattccttgatcgtcgccttctggaatgtaaggttgaaattcgtgtcccatgagaagtgctgattcttgatgttttgggaatttacctctatctcgataccgctattgcgtagcttaccaaggttttgccagtttttctcaaaacctgtgacgatagaagtcgggatctcgaataacaggtcggtcgttgttttgttgtaatattctactgtcagatttactcggttgaataagttccagtcaaaacccacattcatgtttttggacttctcccaacctaattcctcatttcctgcttgattccaatagatggcggaagaggggccataaccaccagagaacgcatataacgcttggttcgcgtaatatgagcccggcaagtttccatttgtaccgtaagagaagcgaacttttagatcagagaacaattcattgcctttaaggaaattctcgccactgatgcgccatgcgccagatacggaccagaaattcgcccagcgattatcggttcccaagcgagaagaaccatcccgacggaaactggcagacagatagtatttattgtcgtaattatagttgccggtagccaagtaggatacgattccggagccaaatacttcgctggatgcgccatctggttgtccgtttcctaattccggtaacttgtcggttgagtattgttttgccgtagtatagatggctgtcagttcgtcttctgttacctcgaaaccacctaggatgtcaaaattatgaacatcgttccatgtattagcgtagcgtaacgtggaagaacttgttaaattgcggttctcgtaagtatagcgagatcccaagccgcctacggccttaccgtccacgctgttgggagaccaatactcaaagtgtttcgtatcgatatagtcgtaaccaaaaatcgtcttgaacgataattgcttggagaattttacgcctaaatcaatgttagacatactacgcattacacgggatttaatccattgttccttgcccaacattagatgcggattggaagcggcaccccagtttgagtcggcgttgtatgtaccgtccggattctttacgggagccgtcgggtctgaggagtacaccaagctcagtggagaagcagtaccgataccttgatcttgattttgctgatcacggaaaccattttgggtagtgaatgcgatcatttgcttaacaccgatagtcaaccaattatttacttgatgatctaaattgatacgaccggagaaacgttcgaaatcgctaccgattacgataccttccgcattattataaccaagacctacatagaattgtgtacggtcgttacctccgtttacggataattgatggttatgcgtcaaggctgtacggtaaacctcatcacgccaattggtatccgtgttacccgatgggtcgttgaagaatgcttccatgtcgccttccttgtcaatcaaggcgtatgcttgatcacggttgccagcgagtccgtttaggatataataattggaaatcgcttcttttccgtacaggagcaattcggaggcattcattgtctcgtactgttttacagccatattgctccagccgacctcgccattgtaacttactttcgtcttgcctctttttccggctttggtcgtaatgatgataacgccattcgctgcacgagagccgtacaaggaagctgctgcggcatctttcaacaccgtcatgctctcaatatcatcagggttcaaggagcttagcaaactggactgtttcccgtagtatgccatatccgagtctgattttacaggcacgccatccacgacatatagaggagacttggctgcgctgatagagccgacaccacggatattgatatcaccgggagctcctggatcaccagtgttggaggttacgcgaacaccggacatctttccagaaagagccttatccaaggactctttggagccagctacgatatcttctgcgtttaccgctttagcggatcccgtgaaagatgattttttcgccgtaccataagcgacaaccataacttcatccagctctgtcgccgccgtattcaaaacaactttcattacatcttggattggagcttctttcgcaaccattccgacgtatgaaaataccagagtcttcgcggaacttggtacatccaaactgaacacaccatcaaaatccgttactgtacctgtagtagtacccttgactattacagacgcaccaataatcggttcactgtcttcggcggaaataacagtacctgttactttcctcgtctgagctgtggccaatccaatgcctaaaactaggcaaagtaaaagataagtcaacttgttcatagacacactctttttttgtttaacttatataatatattcgcaatagatattcaaagacttatattttaagggtcgtatgaatgcaaatgtaacaataaatttattataacaaataaataattaaaaaatttcaataaaacaacaagaaaaggctaatgggtagaaaatatggagactttttcaaccacaatttaaatgccccttaattccgcaacactattacaaatataactttttaagtacctgagcaacaaaaagttgctcaggaatttgccatgtcagatttttcacctatcttagtgttgcaaatcaaaatatgtatcaaacccgacagacatggcaaaggtagcaattaaatccgagaaactcactccttttggaggaatattttcaataatggagcaatttgactccagactctcatctgtaatcgactcaaccctcggtatgagatgcaggctgtatggttatcaatacagcgaaatcatccgttcgcttatgagcgtttatttttgtggcggctcatgcatcgaggatgtcaccactcatctgatgtaccacctttcgcttcatccgacacttcgcacatgcagtgccgacacgattcttagagccataaaggaactgacccaggataacatttcctacacatccgacactggcaagacctacgacttcaacacggcagacaagctgaatacactgctcctcaattgcctattgtccacagggcagctgaaagagggcgaggggtatgacgttgacttcgaccaccagttcatagaggctgagaagtttgatgcgaagcctacatacaagaagttccttggttatcgccctggcgtggcggttattggcaacttgattgtcggcattgagaacagcgacggcaacacaaatgtccgtttccaccagaaggacacgctgaagaggttctttgaaaggtttgaacaaaacaagcttattatcaaccgtttcagagctgattgcggctcgtgttctgaagagatagtggaagagattgctaaacactgcaagaccttctatatccgtgctaaccgatgcagttcgctctacaatgacatctttgccctcagaggttggaagaaagtggaattgggcggcattgagtttgagctggcctccattctcatcgagaaatggaaagggaaggcataccgtcttgtgattcaaagacagaagcggatagacggcgaactcgacctgtgggaaggagaatacacctaccgctgcatccttacaaatgactacgagtcttccgagaaagagattgtcgaattctataacctccgtggagggaaggaacgcatcttcgatgatatgaataacggattcggctggaacaggcttccaaaatcctttatgggagaaaacacggtgtttcttctgcttatggcactcatacgcaacttctataaattcatcatggcgaggcttgacgtgaagaggttcggactcaaagcaacaagccgcatcaagacgtttgtctttaagttcatctctgtgccagccaaatgggtcaggacatcaaggaagtatgtgctgaatatctattcatgcaacaatgcttatgccaatgtgttccagaatgactttggataacaccgacaacttatagtcgtgattttgcgtattgcctcaagtcgcatggtggggtaaggggcatttatatgtctttatggtgacattcgatgcactgtgccccctttttactaacgatgcagattcttttcgcttctgtatcatattaggcgcgtagttgcggatttgaggatgccgtaatatgtacaccaaatattacagcttagatcatcaacaaagaaccatatttttaacattttgaaaaataggaatatatattaggtatgcattaaaaaataacttaggacggctccgatataagtcataagttctacaacacccaaagacctaggaaaggcttttcaagtgattagttattcacttcccaagctgttagttagcggctaggtatagccgttagttattcacttgagtagccgatagtcgttattattattcgcttattttcaattatttacgcataagtagccaatgccttctcgcaatccgatccgcaaagaaatgatcgcatgaaaattgtaacaagttatttcttgagcgttactgaataatcacaagcaatgacaaggttccgcgaaaactaagtaataataaaaaataacctattattcataggttccgcgaagactctggtaatttcttatgtgggtatgattgctcgtgaggttccggtacaagatgtgttgagggtagtccttcagtctggtacccagaatcttgaggaggttgtcgtaactgcgattggtatgaaaaagcaggaaaaggcgttgggctatgcagcctctactgtgaagagtgaagatttgaatgccgctaagtctggatcagtgatgtcaggtttgactggtaaggttgcgggtttgaatattactagcggtggtgctacaggctcttctcagaaagtaatcgtgcgtggtatcagttctttcagtgctaatcaacctttgtatgtggtggatggtgtgcctattatgaatgatttccaaggtgaggattctttctctaactccgtggattttggtaaccaagctaatgacattaacccagaggatgttgagtctgtaacagtcttgaagggtgcttccgctactgccctttatggtagccgggctgctaatggtgttatcatggtgacaacaaaacgggctggggctgagaggctttctgttacgtacgatggctcatttatgggatctagcgtattgcgtgttcctcaaacacaagatcgtttcggacaaggatggggatctttcggacctatggagaatggttcttggggaccggttttggatggtcgtgatcatatctggggaccttactcagacggctcagaaggtttattaactccgctttctaagcctttctcgtatgtaaagaacaatcttcgtgatttttatgaaactggttttgagacgaataataacgtctcgattcgtatgggtaatgataaacttggttttgttgcctcctatggtaatgtgaagtctgacggtgtattaccgggtgacgctgattcatatgctcgtaatacaatctcgttaagaggtaatatgaaatataaacgtttttctgcggaattaaacttgaactatgtccgtaaagatatcacacaagctgctgctggccaaggagatgatggtgcaacgatgttttctgagattttgcaacatgccgtggatgtagatattagctcaatgaaagattatacgaatccttattttaatacggataacttctatacagcttatgcggagaatccatattgggtgttagatcataatcgtaataagtatcaagatgaccgtgtctatggtaagatcgagcttgcttttgagattatgaaaggtttgaaggcggttggacgtttaggtggtgactttacgaacgctactcaaaagagatggaatgaaaaagtgactttcgcttcagggtcttggagtgaattaggtggtaagaagcagcagcccggtacttatacggaacgtcgtgacaaggtggagcaaattgatgcgaccgctttcttaaacgcggattataaaatcggtgaggatatcgctttgaatggtatgattggatggaacttgaatcaacaaacgagttcttatttgaaatcttatctgtatggtttggagcaaccgggatggtttaacttagcgaatggtgttgataagcccatgactacgacttactctgatagacgccgtttggttggtttgttcgctcaaggtgagtttggttacaagaatttctggtttgtgaatgcttctattcgtaacgactggtcatctactttacctcaaggaaataatagctttttctatggtggcgtgaatacttcattgatcatcacggatatgtttgaggatttgaaatctgattatctgaatttcttgaaggttcgtgcagcttggggacagactggtaacgatgctccgatttaccgtactagcagttattttacaccgactcaaatcagtttaggttttggagatttatatttacctattaataatacattaggcttgacagagtataatcgtttgccgagtatggatcttcgtccggagatcacgacagaatgggagttcggtttaacaacgcatctgtttaacaatcgcttggatattgatgctgcttattataataagagtacgaaagatcagataatatctgctagtctggctccggagtctcgctatacgtctatgacccgcaacgtaggtaagattgcgaatcaaggtgtcgagttggcagtgaatggcattcctgttcgtacgaaagatttcgagtggggattaggttttactttcagtaagaactggagtgaggtgaaagagttatgggatgatgtaactgagtataaattgacaagttcctatcaagtggatttcgttgcggaagtaggtcagcctttgggcgttttcaaggttccggctttggccacgactgatgatggtaaggtgatcgttgataataacggtatgccgacaattgatgctagcaagaaagagatcgtaggaacgtctacacctaatttcttgatgggctttaatacgcatttcacatggaaagggattactttatcagcggtattagattggcgtaatggcggtgagttctattcatatacctctcaattgcttacatttgccggaaactctacttatacggtgtttaataatcgtgaaccatttgtggttcctaattccgtgaaagtcgtaaatggtcaatacgtagagaatgatatacctatcgtacattggggaggtgcttctagcgctgttaatacctactataataacgcctccaactacgctcagtatagaaattggattttacctaaagattacttgaaattaagagagattacactttcttactctttgccgaaagcatggttgaaacaaaccccattctctatggttcaagttagtttgatcggacgtaatttatttatgtggaccccgaaaaagaacaactacgtagatccggaaggtacgaattatggtaatgacatcttgtctgaaattggtgaatttggtgcggctccgacaaaccgtacgtttggtggtggtattaaagttgtattataataagtaactttaaaaagtaaagatagtatgaaaagaaacaatttaatatatacaggactggttagctgcttgttgatggcgactacagcttgttccgattatttggatattaaccagaatccggaatatccaacggaagcctcttcttctactttgcttccttctggtatcgcaggagtagcaagtattgtaggtggtacttacgaattatatggtagcatgtggtctcagcaatgtacgcagggacatacatccaaccagtataatacattggttaactatacgataactaacgcatccgattctcgtttgtggtctataccttattcaatagcactgccagacttggatttggttatcaaaagctctgaatcggctcaagaatggaattattgggtaatgggtaagactatgactgcctttatgtatcatatcctagtggactcttatggctctattccttttacagaagctattcttgggaatgagaatactacaccgaaatatgatgacagtaagactgtggtttatccgggattattagcgatgttggacgagattatcgctaaaaaagcggaagctaccgcaggtggtttgccttcggttacaaaacaagacttggtgttcgctggtgacgtgaataagtggattcaatttgcgaagagtttaaagctaaaattgttgatgcgtgatttcgatacgaataaagctgctatcaaggcattgctcgacgaaggagatttgctgagtgtagacgctaagatggactgttttcaagatttggaaaataaatcaaatccattgtatgagaatgaccgtcgtaaattgaattcaactgtaaatattcgtgcgtgcgctacggtttgcgattatttgaaaaaatatgaggatcctcgtttaaatgatttttattcacctaatacggatggctccggcgagacaacagctttgaagtatggtgaccgcccaaactcggtagcggtaacaactcgtatgatctctgtggctaagctaggtcctacagatcctgtttattttatgtctgctgctgaggtagcgttcctgcaagcggaagcttacgctcgtttgaatgatgtggctaaagcgaaagtggcttatgagcaaggtgtgaattatgcgtttgaacgttgggggtattctgctgccgagtttgtttcggaaggtgctccttatgctttcgatagtacggaccaaaattcaatgcttacctctattttgacccagaagtggatcgcttccactcgttgtcaagcatgggacgcatggtttgatatcaatcgtaccggtattcctgttttagggacaaagcatgtggatgaggaaggatatatttgggggcagttgactccttgcattggttctgcgttggctccgggtgaatatcctcgtcgtttattgtatccgaagtcatcttcagactataaccctaatactccggcggtagttccgttagcggaaaaacaatggtggcataaataaatgggtgttataaatgtatattaatcagaaaagttttttgaatatgaaacagataaataaattactggttatcttattggcgttggtcaccttttcttcttgtgagacttatggtgattacgagatagaatacacggctatttaccctttatgtggcgaatgggtagttaatgttacaggtgaggatggtggtgtcttggcggaaggtgtgacctgcaatacttacaatacgactgatgatgccacggataagatgtggataaaaatgagtgttgccacaaacgactggggagtacgtggcaagattcattgcgatgtcacttctaaatcttttgatggggatggtatcgctaatctgctccatgcggatgatggtataaattctactgtaaccttcaatatctctggtaaagtaattgtggatggttatactactcaagccaatacaaaagtggatgccattgaatttaccttgactcaaaatggaaagtcgatgacggttaagggattccgtaaaacaggttgggaaggtgaagattattgatatgatttaatatctcgaaaagtaggagaggcctgccatgtatttggtaggccctttttatttacttggatatatggttttttattagtaggtaatccgtgataacaaacttttagtttgtagattgtgctacaaagaacttattattgttccttcgtgtttacaatcagataatatataaatgtatcatggaaaaagtaatttacaacttagtgtttaatcgaaaaaagcaattgaatgcggaaggaaaagctttgattcaagtagaggcctatttgaataggcaaaagaggtatttttcaacgaaggtttatgtgaaaccttgtcaatgggacaacaagagacgttccataaagaatcatccgaatatggatgcgttaaacctgtatcttcagaactatgttatggagttggagagagatgagctggagaagagacaagcgaataacggtttttcgttgaaggatctgcgtgaggaggcttcttcgacatctacgtcttcctcttttcttgttttcatgcgtgaggagattttacatagtaatttgaaagaatcgacattaaaaaaccatttgtccactttgcatgttctatccttatataaaaaggacgttctgtttaaggatattaatttcaatttcttatgcgattttgaatatttcttattgaagcaggagtatcatcgaaatacgatcgctaaacatatgaagcatttgaaacgatatatcaacttggcgattaataaggagttgttcgagttgcacaaatatccatttcggaaatataagattaaatatcaagagagtaagcgtactcatttaacgcctgaggagttaggtcgtttggaaaacttaaagctggatgggcagcgtacattgcgccggtgtctggatatgtttttatttagttgctacacgggattacgtttctcagacatagtaagtataacgaaagagaactttttgattattgatgataaggtttggctggtttattcatcggtgaagacagatgtgagtgtccgtttgccgctattcctcttgttcgagggtaaatctttacctatctatgagcgatataagaatgcgccgagaaccctgtttggtgttcccttatcctctaattcaaacgtgaataagcaattacgccgaatcagccaattggcaagtattgataagaaggtatcttttcatacggctcggcatacaaatgctaccttattattatataatggagcgaatataactacggtacaaaagttgttagggcataaaagtgttcgtactaccgaaatctatagcaatatcatggatatgacgattgtccgcgatcttgagaagattgagacacgattgaagttcggctagaatgtggatttataagaaaggagaaaaatatcattaagatattcttccccttttttgaatgttgtcactcgttatgcttttatatattgattagcgagttccgccagcccaccatacgttttcggtaaacacatactgaccatcaccataagcagcttgtatattaggattagtcgtagtatcatcattaccatacggacatcttaacgggaacttacccggattttgcaagccataaatatcctcacccaagctcttcaaacgacgtacgtcattatagcactcggtagactctccatctgcgttccagaaagaaatatatttctgaatcatcgtctctttcaaaggattagcatcgaataagggaacgacattctcatcaaagtaagaagcggcctcctccggtgtcacctcgtttgttacattcaagaaacctccccaataatcagaagcgagggcagacttgatattaacctccatattagccatacctgcgacaacagcctctttcaacactgcttttgcctcatccttacgatttaaacgacacaaagcctctgccttcaagaacaatacctcatgataacttaagatgtgagtcggagcggtttgagctgcacagaacatggaaacagtatattctaactgactttgcactaaatcaccattatgagcaagattcaataatggatcatccttagaagcaatcatcgtttggctgttagcctccacatagcaacgtctgatacgcggatcattacgctcattcaatttatcaaacatacttcggctggctacttcacctaaacgagaatagaatactccgaaaaatgggttgatattaacacccacaccatacatagcatagctacattgctcggctgccgaggtgtacgacttggaaatataatccaacaccttttccatatcgcccttaacatcagcgctacgtcccatcaagcgcatcgtataacgagccttcaagccataagctgtctttagccaagccgaagcgtcacctttataaatcaaatcttgattagacaggctcgtcagatctgatttctgaagatcttcaattgcggcatccacataggccatgatatccttataaatctcctcttgtttatcgatagcgggagtcatagatactgtatagtcacaagcctctttccaaggtgtatcaccatacatatctgtcaagatcgccaaattgtaagccacgaaaagttccgcaatgccttttgttatgaagttctgctcttcttctgcgactttgacagagatcaaagcatctttcagtgtcgaataggttcccccccatgagttattaaaggtagaagccgatgtacaagaagaacgggtttccgcatagtagaattgattatgcgaacctgtctcatgttccacatacataccaccatataaattgaaatcgccgctaaccacgctaaacgcagtcgaagtcatgacatccgtaaggatcatctttgcgggaactgctgtggtatgattatgatctttgttgatctcatccatcttatcctcagagcaagagaccaaggctgcggtgaaaacaactcccgtcaataatttttttgagatattttgaagtttcatcttttgtttcctttattagaatttcacatttaaaccgaagccatagctcgaagcacccggcatagaaaagcgctcgaagccaccgcccatattattattaccttgagaagcctcaggatccaaacctttcaactcagaccaaagaatgatatttctggcaaaaacatttaagttcacgttgattccattcttatcccatatcggataactaacggacaactcacgtagtttcaagaaaccactgtcatagataccagcttcggaaataagcgtcatgcggtcataatatgataaagcgtcttcgcctttgatatctatgtcattagctacataggaaccatcttccaactgctttacagccggatgactaaaacggaaagtctcggccgtacgactttcaacagactccatacttgtaccataatagttcaacgtgttcaatgtaccgctatacatctgtccaccacatttccaatcgaacgtagcgccgatacggaatttgtagatctcaaaattagtattgaaacccaagaggaaatccggggaaaccttaccgatcacaccctcactaccgatctgaggcaagccatcttcgtctacgacaatgtcaccgttgtcattacgcaagaaagtcgtaccatagattacagggaatttatcgccaatattcgcacgtacctgcggatcaacgaaacctcccaagaaaatactctctacacccggagccagctcatccacgtagttatcgatcttagagaagttaaatgccatatcccatttaaaattcttcgtattgatcggattgattcccaacgtaatctcatgagcgttcgtatggatagcgccaccattggttactaattctgcagagcctgtagaaccagccaaaggaacctcaaatatctgatctttcacattctgccgagagaaggtatagttcaatgagaacagaccattcaagaaggtcaaatccacacctaactcataagacttcgtgttctgaggtttcagattcggatcatacacacgagcatatggagtgaacgccgtaattccactcataggatattgtataggcgtagaaccataaaaaccaccaccgtaaacaggtgtagtataataagaatcataataatctccagcctgtcctacttcggcgtaagaagcacgtaatttaccataagtcaagacattattcttcaatggttctaattctgtgaaaatccagcccaaggaaacagatggataagtgaatgagcggttgttacgaggcatattagatacgatatcgttacgaacagttgcgttgaagtaaaccatgttagcgtaagacaatgaaatgctagcaaagttaccaactgtgcgtttccggcgtaatgactcggatgctaccatagttgtagcattatctatatgattccaacccgggaagttatagttcgctccataagactcgtaaaatttccgctgattctctaccaattcattaccaacaagggcatcgaacaaccaatcttcattgatattccaagtatatgcagcggtcaacaaagagttcaactccgtgattgaatatccatagtgatcaatctctccataaccatttgcatgtccataaccccaagaatccgtataattagtcgtataagagtccacacccaattgatacttgacatccaatttgtgattatcggtattgaacttcgtagaatatttcaaataagtatttccaaagaaacgttgtgaacgttccaagaactcgttgttatctaccgcccaataagctccgtcaaaacctgatgtgctacggaatgtattttgtgtatacgggtcaccctcaacatgacttgggataccggctaaatcgtagctagaaggagctccgtaaacagtagctaagattccattattggcactagactgcttgctgatcttcgaatttacataggtaccggtaaatccagtagaccagttcttgtgtaattgagcttcggcactcatttttgcgttgtatcggtccatgcctgtatttggaataataccatcttgcgtagtattaccgatcgagaaggaatagtaacctttatcaaaagcttgagctacattcacggagttactccatgtcgtacccacgttgaagaaatccttgatattgtcgtaagcttgtggttgagcccaagggtctaatcccgcagcggcccgctgaggtacataatacataccttcatgcttaccatattgcttggtaaactcattatccgtatttcctccataagtcggatcgttaggcaattcgctgattagtggtccccaagaagttgaagcatacgggctatacttgccatttgtaccctgcgcatacactttttggtattcaggcatcgttgaaaccttatcaaaagataagctggtattaaaagcgacctgaggtttacctttacgggctccctttccacttttggtcgtaatgacaattactccatttgttgcacgcataccatacaaggcagatgcggcctgtccctttaatatattaatgctttcaatatcgtttgggtcgatatccaccgcacgagatgcaaagtccgtgccggaaacagaactaccggtgtccacatcagccgttgaagcgacaggcataccgtcaatcacatacaaaggagtattatcccctgtaaaagatctggaaccacgaatcgtgatcttagaagaggcacccggcataccggaagaaggagagatctccactccagaaaccttaccttgtaatgcgccagacaaactagtattagctcctttcgtcaactcatccgctttcacatcttgaaccgcataacctaaagctttcttttcctttgagatacccatagccgtaaccacgacctcatccaagttctgggtatcggctaatagttttacatttacattagaagtggccgcaacttcttgagatttcataccgatgtatgaaataaccaattgtttaccattcgcaggtacttctagttcaaagtttccatcaaaatccgtgactgttcccacggttgtcccttttacgataatagaggcaccgatcaccggctctccatcttccccaattaccttaccggtaaccttcgaggtctgtgctgaaaccacacctgcactcaatgcaagaaatagtagcacagaagtcaactttttcttcataaacacacttatttattaactatatacttaaaaatgttttctctgcattttaatggttgattaactaagttcatacagaactactccattttatgttttacgacatacctattaaatgaaaaacggttgcaaaactataaattatacctgaaaaaaacaacaaattattattattgtgatatatttcctttgttttcttaattgttaaatctgtcaatttgcaatataaccactgtctaaatcgactcaggtgacatgatcgtatcacaaatcaatgagttatcgctgccgatagtttctttttgacaaataaaaaaattatttttatcttaattttatcgtaacaaatagtgagcttactctttataggcatgatattggacttgatatcaacttattctggatattttatagcatatagcttatcactaaaaatatttacaactttattttagtagatatttgtgaaaaacggctggcttttcttatcctcccaatatggctgataaacaatatctctcaaatccaatatatttattacagaattttaatagatctaaacttatatgataatttttttttcatatgactacactaaataaaatattgaaaattggtagttctgtatgaactatagtccacgaaagcttaattgaatttctagtttagtttaaataaaaagaatgtgtctatgaagaaaaagttgacttctgtgctactatttcttgcgatgagcgtaggagtagtttcggcacagacctcgaaggttaccggtaaggtagtcggagaagatggtgagccggtgatcggtgcgtccattatcgtaaaaggaacgactgtgggaacagttacggattttgacggtaattttactttggatgttcctagtgatggtaagcaattagttatttcatacatcggtatgaaatccaaggaggtagttgtgtctcccaatgtaaatgtaacattgatgtctgatacccaaaacttggatgaggtcgtggttacagcgatgggtatctcaaaggaaaagaaagctttaggttatgccgtgcaagatgtaaaatcggatgagttaacacaaggtgctaacactagtttgtctggggctttgcaaggtaaagtatccggtatcgatatcgcttcctcatcgggtatgccaggcgcatcttccaagatcatgatccgtggagcccgttcatttacaggggataactctcctttgtatgtgatcgatggtatgccgatcgcttctacggcggatgttaatacggatactatgaataatggtagtgttagtggagctgactatgcgaaccgtgccgtagacttagatccgaacgatatcgagagtatcaacatcttgaaaggacaagccgcttctgcgttgtatggtatgcgtgcttctaatggtgtgatcgttattactacaaagagcggaaaaggtgctcgtaaaggaaaacctcagatctcattcaacacgaatcttgcgtttgataaggtttctacattacctgagttacaaactgaatatggacaaggtaatgaaggtgcttataacccatattcgggatttagctggggaccgtctatctctgacttggcgaatgatcctgtatatggcggtaatgtacaaaatgaatatacggaaggtggattgcataatggacaatactatgtgcctcagcgtgctgcggcaggattggatccatgggctactccccaagcttataataatgcgaaagatttcttccagactggcgttacttggagtaactctgtaaatgtagctcaatctttcgataaaggaaactattcattttctttgggtaatacgacttctgatggtatcgttcgttctacgggaatggatcgttataacgtgaagctgtcgggtgaggcgcaattgcatgataactggacgactggttttaacggaaacttcgtgacatcaaagatcaagaagcaaggaaccgctaatgacggtgttaccgctacggtttatacggctcctatcagttatactatggcgggcataccttcccatatcgaaggtgatccttatactcagaatacgttccgtgagaactggatcgatgatggaaactgggcgtgcgacaataatagctttacggagagatctcaacgtttcttcgggaatgcgttcttgaagtattctactaaatttggtacggacaatcataaattggatgtgaaataccaaattggtgatgacgcttatacgaccaattactctgatatttacggctacggtacaactggttatgcgaatggttatgctagcgaatacggttttacggtaaatgagatgaactcattgttgacgtttacgtataactggaatatcaatgaggacttcgtattcgatgctttgttgggtaatgagcttgtagataagcgaatcagtaatactcaagccgtgggatatagcttcaacttcccgggctggaaccatttgaacaacgcttctgtattcaacagctctcatgagtataagagaaaacgtacggtaggtaacttcgctagcttatctttggcttggaagaatatgctttatttgaatgttacgggacgtaacgatatcgtgtcttctatgccgagagataaccgttcgttcttttatccttccgtatcccttggatgggtattcacggaagtggaagccttgaagaatgatatcttgacatttggtaagatccgtggctcttacgcagaggtaggtatggcaggagaatatgtgccgtcttattattatacgccaagttatggtggtggtttcttccagggaacacctattatgtatccgattaatggaaatatggcgtatattccttatttcgtggtttatgatccgaacttgaagcctcagaacacgaagtcttatgagcttggtgctgacttgactttcttgaatggtttagtttcattgaattatacgtattctcgtcagaacgtgaaagaccaaatcttcgaggtgcctttggctggctccacaggtgcttccagtatgatgatgaatggtggaaagatgcactcaaacgtacatgagattacattaggtatctctccggttgatacgaagaatttcaagctggacttcgcttttaacttctcaaagatcgacaattatgtagacgagttggctccgggcgtagagagcattatgttgggtggtttcgtgactcctcaagtacgtgcaggtatcggcgataaattcccggtaatctatggtgttggttacaaacgtgatggcgaaggacgaattgtagtaaacgaaaaaggtataccagaggctggtgagacccaagtaatcggtaaggtttctcctgatttccgtttgggtttcaatacgaatatcgagttgtataaattccgtttggctgctgtatttgactggaagcaaggtggacaaatgtatagtggtacggctggtgagacgaacttctatggtacaagtaagttatctggagaggttcgtaagagtgataaatatcattttgactatgctgctgttgaacagaagggcgtagatgcggatggtaaacctatctatgttccctatacgggtggagtgaaaggatcagatgcagaggagtatttcaaaagcgtgaggggcattgacgaagcctatgtttatgacaactcgttcttgaaattgcgtgaactttcattgtcatatcctgtatataagaaagataacttgaatgtaaacgtgaatgttttcgcccgtaatatcattgtatggtctgagataaaaggcttcgatccagaggctactcaaggaaataacaatatggctggcgctttcgagcgtttctccttaccgggtacatctagctacggttttggtgtcaacgtaaatttctaatttataaagaagacagatatatatgaatacaataataaaatcatttaaagggttggctgttatgtcggccgtatccttggcattggctggatgttccgaggatgtaatggatcggattaaccaagatacgagccatacaaatagcgtggatggcaaatttatcttggccgacttgattacttctactgcattttccaacgttagcggagacttcaatacctattcatcttcctacgtggaatatgaagtgggtatcgaaaaccagttatataacgcggaaattcgtttgaatgagccttctgcctcttctacgtttgagaatacgtggggaaatgtttatacaagcttgaagaacgctcgtgttattatcggtcaatgtcaagaaggtaagcgtgatgagggaaatttagtgacgagaggtatcgctgaggtcatggaagcttacaatggcgctctattggcggatatatttggagatacaccttatagtgaagcttctttattggatgagaatggctcaccggtgaatatgaatcctaaaatagataagcaagaggagatttatgtctctataatggcctccttggacaaggcgatcgaggatttgaatcagtctgatcgttcaccggttggtacgtatgattatttgtataatggagatgccgagaaatggattaaattcgcttatggtttgaaggctcgttatacgatgcgtctgatcaatcgttccacggataagcaagctgacttgaataaggttttggactatgtatcaaaatcttttacttctgcggatgacgaggctgcatacgctgtctatgatgcgaataatatcaacccattctttggttacttcgattctcgcgctggttttgccaatagccagagcttgacggacaagttgattgagcgtaaagatcctcgattggaaagagtgatgctttctcctactacggctgacaagaaacgcgtacaggttacaggctctgctgataagaacttagttccggccccgaatggtactcctgagcagaatatgcagaaatatggtgtttccgcctttgtatattcaaacacggctcctacgatgttgatgagttatcatgagttgaaattcttgcaagctgaggcgttatgtcgcttaaaccgtacgtctgacgccgagaaagcgttgaaagaggcggtagctgccggaatcgcaaatgctgagagaagtgtctcttctgctatcacttatatgggtagcaaaatggtcgtgaattcagaaaaaatgacagaggagacggccaatacatatttcgataaccaagttaaaccgttgtttgctgtaaatcctttgaaagagaccatgatccagaaatatctggctttgtggggggcatcgggagaggctaccgagacttttaatgatatccgtagaatgaaaggattaggagagaatttcgtgacattggcgaatacgaaaaaattccctcttcgtatgccttatggtaatagtgacgtggtatcaaatccggaagtaaaagccgcttatggcgacggtcaatacgtatattcagagcctgtatggtgggctggcggaactcgctaatctaacatatataatataaggtatagggtgcctctccgattatggaggggcatctttttttgttatatatcttacatgttttgatagcttcccttatcccatttccttggaaggcttattggttttatatggaaatatagatcatctaacaattggtgcatgatcatctaacagacgttgcatgatcatgcaccaactgttggacgatcatgcaccagttgatagatatttaatgcttcaagaaagaaggtataatgtgttaagaagatatcgctaaaagtatgggatagaaaggatagggaattaagggaatgttaaattttcattgtcataatgttagtatattatatgggtaaaagtgtatttgtagtgattgttctttcattatgtcactatttcctgttgtttaacattctttttatacgataaatttcttgacttatcctttgaaaagtaaataaaatatccgacttttgcttccatgatgagtcaaccattagcagagagattacgtccgaagacgttggatgattatattggacagaagcacctggtaggccagggagccgtgttgaggaagatgattgatgcgggacgggttccctcttttatattgtgggggccgccgggagtcgggaagactaccttagcgcagatcatagcgaataagttggatgcgcctttttatacgttaagcgcgatcagttcgggagtgaaggacgtgcgggaggtgatagagaaggccaagagcaaccgcttcttcaatacggtatcgccgatattgtttattgatgagatacaccggttcagtaagtcgcagcaagactcattgctgaacgccgtggagacgggcgtggtgacgctgattggggcaaccacggagaatccctcgttcgaggtaatccgtcctttgttatcccgttgtcaggtgtacgtgttgaaatcgctggacaagaatgacttgcttacgctattgcataaggcgatcgccgaggatgtcgttctgaaggataaaaacataaggctgacggaaacggatgccatgttacgttactcgggaggagatgcccggaagttgctgaatattctggaactggtggtgtctgccgaggagagtgacaatattgagattctggatgagaaggtagtggagaggttgcaggagaaccctgcggcgtatgataagggaggggagatgcattacgatataatctccgcttttatcaagtcgatccggggtagcgatcccgatggcgccatttactggctcgcccgtatggtggccgggggagaagaccctgagtttatcgcacggcggttggtgatctccgcttctgaggatatcggattggcgaatccgaatgcgcttttgctggcgaacgcatgtttcgatgccttgaagaagatcggctggccggagggccggatcattctggccgagacgaccgtttatctggcttgcagcccgaaaagtaattcggcctatatggcgatcaacgacgctttggcacttgttaaccggactgggaatttacccgtaccgcttcatctacgcaacgcgcctaccaaattaatggctgaattggagtatggcaaggaatataaatatgcgcacgactacgaaaatcattttgtaaagcaggagtatcttccgaaggaaattttgggcgaacgtttgtggaaaggacaggaaaatccggccgagcacaaactaattgagcaaatgaggcgcctttggggagatcgtttttaattgacatattctgattgtaaattaaaaaatgctcgaaaagtgtcggcaaatgagaaaaaatagttacattagccgcctgtttttgaaaaaatagttactttatttataataacattctaaaaagacattggtatgaagaagcacaatttttatgcaggtccttctatcttgagcgagtatacaattaagaatacagccgctgcggtagaaaattttgcgggtatggggttatcacttcttgagatctctcatagaagtaaggagtttgtagccgtaaacgacgaggcacgtgcgttgatcaaggaattactggatgttccggcaggctatgaggttgtattcatgggcggtggcgccagcatgcagttctgtatggttccttacaatctgttgaataagaaagcctcttatttggataccggcacatgggcttcgaacgctatcaaggaagctaagttgtttggggaggtagatgttgtcgcttcttccaaagacaagaactatacttacatcccgaagggttatgcgatcgctgatgactcggattatttccattttacttctaataatacgatttacggaacagagatgcgtaaagatccagatgtgaagcaacgtttggtttgcgatatgtcttccgatattttctctcgtccgatcgatatttccaaatatgatattatctatgcgggtgctcaaaagaacttggctcctgccggcgtgactttggctatcgttcgtgtggacgctttaggacatgtagaccgtccgatcccgaccatgttgaactacgctacccatattaaaaaggattccatgttcaatacacctcctgtattgcctatttacgcggctttacagaccttgaaatggtataaggaacaaggtggtatcgccgctatggagaagaaggatcttgagaatgcggcgatcttatacgatgagatcgatcgtaataagttgttccgtggtacggtagcggaggaagatcgttcgatcatgaatgtttgtttcgtgatgaatgatgagtataaggagttggaggacgagttcagtaaatatgctactgccgctggtatggtaggtatcaagggacaccgttctgtaggtggtttccgtgcctctctttataacgcgatgccgaagagcagcgtggaggctttggtagcttgcatgaaagagttcgagaaacaacattaatcaaggaggattcagacatggcaaagatattagttgctacagagaaacctttcgccgctgtcgctgtgaaaggtatccgggaggtagtggaaggcgctggtatggaactggctcttttggagaaatatacagagaaggcgcaattgctggatgcggttaaggatgccgatgccgtgattatccgtagcgataaggtggacgctgaggtattggatgccgctaagaacctgaagatcgtggttcgtgccggtgcggggtatgataacgtggacttggatgcggctactgcccataaggtatgcgtgatgaatacgccgggacaaaactctaacgctgtcgccgaattggtattcggtatgttggtgtacggggttcgtaatttctataacggaacttccggaacagagttgaaaggaaagaaattgggtatcttggcttatggaaacgtgggccgtaacgtggctcgtatcgctaaaggcttcggtatggaggtttacgcttatgacgcgttctgtccggcttccgtgattgaggccgatggtgtgaaggctgtagcttctacggcggacttgttcaaggcttgccagatcgtttccttgcatatcccggctacggccgagacgaagggttctatcaatttcgagttgatgaattccatgccgaagggagctatcgtagtgaatacggctcgtaaggaggtgatggatgaggctggcctcgctaagatgttggaagagcgtccggatttcaagtacttgacagatattatgcccgctatccatgcggaattggccgaaaaatatgccggtcgttatttcagcaccccgaaaaagatgggtgcccagaccgccgaggctaatatcaacgctggtatcgccgccgccaagcagatcgttgatttcttggtgaatggcaatgaaaagtatcgggttaataaatgagaatatccggttgtagagacgggtacgccccgtctctacattgatacataaaccaattagatttaattaccatggcaaaaataaaacctttcaagggagttcgtccaccaaaagaatttatagaggaggtggcttcccgcccctatgacgtattgaactcgcaagaagctcgtgcggaagcggaaggaaacgagaaatccctttaccatatcattaaaccggaaatcgatttcccagaagggacggatgagcatgatccggctgtttacctgaaggccgccgccaatttcaataattttcaggaaaaaggttggttggttcaggatcagaaagaatgctattatgtttatgcccaaaccatgaatggcaagactcaatatgggttggtagtcggggcttatgttcccgattatatgaatggcacgatcaagaaacatgagctgacccgccgtgacaaggaggaggatcgcatgaagcacgtacgtgtcaacaacgctaatatcgagccggtattcttcgcttatcccgacaactcagagttagacgctatcgtaatgaaatatacggctcgtgagcctgaatataatttcgtggcgaaattagacggtttcggccatacgttctggattatcgatgaggataaggacatcgcccgcatcacggagttattcggggagatgcctgcgttgtatattgccgacggacatcatcgttccgccgccgctgctttggtaggagcggagaaggccaagcaaaacccggatcataagggagacgaggagtataactatttcatggctgtttgcttcccggccaaccaattgaccattatcgattacaaccgtgtggtaaaagacttgaacggcttgaccgaggaacaattcgttgagagattaacgaaaaacttcgtggtagaggagaagggctctgctatttacaaaccgggtgccttgcacaatttctccctgtatttaggagggaaatggtattctttgaccgctaagcccggtacgtacgatgacaatgacccgataggcgtattggatgtcacgatctcttcgaacttgattctggatgagattttaggcattaaggatttacgttcggacaagcgaatcgatttcgtgggaggtatccgtggcctgggtgaattgaaacgccgtgtggatagcggtgagatgaaggttgccttggctttgtatcccgttacgatgaagcaattgatggatatcgccgatacgggtaatattatgccgccgaagacgacgtggttcgaaccgaagcttcgctccggtttggtgatccataaattggattaagtcttatatacataaatatagctttggattggggtataatcgttgaagattatacccttttttatccttgtaacctagatatacggaataaattgtatctttaggacttaaatagtatcgcaatgggtaaaataaaaaatatagtattcgatctgggggcgttatcatagatttggaccgggatgaacctgttcgtcgtttaatagagattggggtcaaagatgccgatggattgatagatccttacgaacaaaaaggggtttttcaagatctggagaccggaaagatcggagtagaggagttttgtcgctatttacggaagcatacgggtaaagacctttcttatgaggatatttgttgggcttggtttggcttcattggtggcgttccccaatataaattggactacatattaaaactccgtgagaaatatcaagtctatttattgagcaatacaaatccgatcatacagcttgaatgggcacagacaaaagagtttacgccggcgggccgtccattaaatgattatttcgataaattgtatctctcttatgaaatcggtgtcacgaagccagatcgtgaaatttttgatcgcatggtcttggattcaggaatcagaccagaggaaacattatttgtagatgatggtaagaataatatcgtagtggggcaggaactggggttccatacatatcagcctttgaatggagaggattggagagggaggctcgatgaaatactctcaaaatcataggatctctatttctcttaattaaatctatatcattgaaaatgacaaatactactttaaatttggaagaactactctgtgatgtaaacgagctagtcgatacgctttggatcgtcacattaggtaatgaaaaggttgagatagtcaaagattcgatgactcccgaaagggaaggagaatgtttggattatacagaactttgccagacttacattcaagaatatgtatatcctgcggatttagggaaatgggaggagatcttatccttgaattcattgcggcaaatggcggctagcggcgtagcaaataagaagttcgacatgcgtttctgtaatgatttgttgggttttgagtggcatgaggcttttattcgtatcttgaaagataagagtggaattccggatcgtgtcattctttccagccgctatgtgaatcattgtcgcaaggcacagatcgtagaggctgccgttcagactgagtatgattatgtcgtttatatagaggcaaatacgaatagctatgtcatgtatacttccaatcgtgaaagtgggacgccggtccccccgatagcgagtaatgactatgaaaaagaggtagccgagttccaccacaaatatgtgccggaggatcagcgagatgagttaacccgaaatctttccctagatcatgtcttatctatcttacaaaattcccgtgagtatgtcttgttctgtcaggtgatggagaatggcgtttttagggataagaagttgcgttttagctttttcgataaggagaggaatatacttcttttgacccggaccgatattatggaggttcgtgaggaagagcggcaaaggcaattacttcaagatgccctacaagtggctaaatcggcaaatcaggctaaatcggatttcttatcccgtatgagccatgatatacgtactccgatgaatgccattatcggtatgaccactatcgccagtatgcatatcgacgatcgggagcgtatagtggattgcttgaagaagattatggtttcttccaaattgttattgaacttgatcaatgaggtcttggatatgtctaaggtagagagcggacatattttgctgacagacgaggagttcgatatgggcgagttattgcaaagcgtaattactatggttcagacttcggtcagtcagaagtttcaggatttccgggttcacttgtttcaaatcaaacatgaaaagctgattggcgatgtgcaacggattcagcaagtattgttgaatttgctgtcaaacgccataaagtatacgccggactatgggaaaataacacttgagatacgggaaaagccaattaaaaatggtaattatggtttatttgaggttacggttatagacaatggtatcgggataaagccggatttcttacacaaggttttcgaaccatttgaacgtgcggaagacgcaaccttgcggaatatacaaggaaccggcttaggcatggcgataagccgtaatatcgctcatatgatgaatggtgagattctggtggagagtgaatatggcaaaggttctgtttttacatttacgatgcagttgaaattgcaggatcaagggtgttttgaggatgatcatttaagggatttaccggttctcgtggtagacgatgatatcgtgtgttgcgagaacgcatgtatgaggattaacgagatcggtatgaaaggtgaatatgccatttctggtgaggaggctatcgggaaagtagagagggcacatcatcttaatgatgactattttgccgttatccttgatctgaaaatgccgggaatggatggaatcgagaccgctacccgtatccgaaaagtcgttggccgggatattccgatcattattctttccgcttatgattgtccgcattttgaggagatagcccaacgagccggtgtcgatggattcataagtaagccgttgatgaaatccaagttattttatttgatgaaaagtttcgctatcaagcaagaggaaaaagaggaagagacggagaagcctcaatatcctttcggtaactttgagggtaagcggatcttgctggtggaagataatagcttgaatagggaaatagcgactgtgttactagaagagaccggtgcggtggtagaggaggcggaaaatggccttgtcgcggtgaatatggtaaaaaactctagtccgggatattatgacttggtatttatggatatccagatgccggtcatgaacgggtacgactctactcgccatattcgggcattagaacgtccggatatcaagtccatgccgataatagccatgtctgcgaacgcatttgcggaagacatcaagttgtgtaaagaatccggaatgaatgagcatatcgctaagccgatcgatttcgggaaagttcttgagatcttagagaaatacttgtagatataaggatataaaaaaggccatatcttagctaagcgctatcagatacggcctcttttttgtgttatttactggatgccacgttctctcaaacgtttctgccagttccatgcggattgcagggtgtcggctaaagtctccttggcggtccagcctaataccttattcgcgtgctccggattggcccataccttctcgatatcaccttcacgacggcccacgatcttgtgcggaaccttaacgcctgttgtctgctcgaaggtattgatcagttcaaggacagaaacaccattgccggtacctaggttgaatatctcgatatgctcatcagacttattctcaagcatacggtccatagcgattacatgcgctttcgccaagtctacgacattgatatagtcacggatgcaagagccgtctgccgtatcataatcatcgccgaatacgcttaattccttgcggatacccatagccgtctgtgtcaagtacgggatcaagttctggggaacaccatttggcaactcgccgatctctgcgcttgggtgagcgcctatcgggttgaagtagcgcaagatgatactcttgaaaggcgctcccgcatggatcgtatcccggataatctcctcgttgatctgcttcgtgtttccataaggagacatagcgggtttgatcggggcattctcggttaccggcaagttctccggatccggttgtccgtataccgtacaagaggaagagaatacgataccttcgatattgaattcaggcatcatctccaacaagttcaccaaagtgacaatattattgcgataatacttcaaaggctgctgtacggattctcctaccgccttgctagcggcgaacaagataatgcctttgatgcccggatgagcttccaatgccttgcgagtaccttccttatcctttagatccaattggataaactccggacggatgcccgtgattttctcgataccatcgagcacctcgatattcgagtttgacaaatcgtcgataatgactacctcatatccggcgttctgcaattctactgtggtgtgtgagccgatataaccggttccgcccgctactaaaatcttctttttcattctagtgttcatttagataagtttgttatacgatacccgagaatcccataaaagccatagctagcaaaccggccgttatcaaggcgataggagtgcctttcatgccttccggaacatgcgtcatggctagttgctcccgaatacccgcgaagataatcaaagctagcgcaaatccaatagcggtcgagatagcatataccacagattctaataaattatactctttttggattacaaggatcgccacacccaagatacagcagttcgtggtgatcaacggaaggaatacgcccaacgcctggtaaagggcgggagagaccttcttcaatatgatttccaccatctgaaccaaggcggcgatgatcaagatgaaactgatcgtctgcatgaaccctaatccgaaagcgtccaatatgtatttttgcacgaggaatgtaacaatcgtggcgatcgtaagcacgaacgtaacggcggctcccatgcctgcggcagtctccactttcttagatacccccaagaacggacaaattcccaagaactgtgccagtacaacgttattaacgaatacggcggcgataaatatcaatatatattccatatgatccgtttattatgctttacgcagtttgtttactattgctaccagataacccaaggcgataaacgctcccggagccaatacgaagatcagcgaaccatattcctcgggcatcaaggttacgttgaataacttaccggttcccaagaactcacggcaagcgcccagcagcgtaagagccatcgtaaagcccagtccgataccgattccgtcgaaagcggatgggactacgccgttcttcgcagcgaaagcctcggcacgtcctagtacgatacagtttaccacgatcaacgggataaataatcccaagctagcgtataaagccgggacgaacgcttccatgcacatctgcactacggtcacgaacgtcgcgatcacaacgatatatcccgggatacgcaccaagtcggggattacgtttttcaaggcggaaatcacgatattcgagcaaatcaatacgaacatcgtagccaatcccatactcatgccgttgatggccgaagaggtcgttcccaaggtaggacacatacctaacagtaatacaaatgtcgggttctccgtgatgataccattcatcaatatttttagattactcattgttctgtcctccctttttatttgttatcagttgaagtggcacccgttagtccgtctacgccagcgaatgcgctatacgcacggttcacggcatcgaggaacgcacggctggagattgtcgctgccgtgatagcgtccacatcgccaccatcttttgttacttttaagcctccgtccggaatcgtacgtcccaagacactttgcttgttcttgtccgcacggaaccattcttgcatcttggctcccaagcccggagtctcggcgtgttgcaatacggaatagttcaagatcttgccatccatatcgaaacctacgataacccgtatctcaccgctaaagccttttttcgtattactctctacagctccgccaacgacttgtccgcctttcttggcaggataaatcttgagggaatcaccatcggaggagacggccatatagacgtcctcagtcggtttgttgtcgaactcgggagcaacggctttaatcgcttcctccaaggcggtcgctttggctaccgctatagggccggcggtaaactggttcactccggctaggatcgcccctgctaccaagcaaatgcctgttagtgaaaggagcatattgggtaatgttgattttaattttgccatgcttactttcctccgaaatgtttaggtttgatatagctgttgattagcggagtaaatgcgttcatgatcaggatagcgaacgacataccttccgggtaagacccgaacaaacggatcaccgtggtaaggattccgattcccacgccgtagacaagcattccgttcttgctcatcggcgaggttacgtagtcggtcgccataaagatggagcctaataacaaaccaccggataataaatgaacgaacgggctggcgtattgtaccggattcaccaagtgcatgatgcccgtgaatacgaatacggtagccaagatggataccgggatctgccaagtgatgatctttttccatagcatgaataaaagaccgaggatcaaggccagggcgctcacttcaccgagactacctcccatagcccctacaagcatattcccgtaagacggaagctcggtcacgccctcgttcatcaacgacagtaccgtcgcgccggtctgggcgtccgtataagtcatcgggaaaacgttcaaggcatctaccaccggccaagtcgtcatctgcgccgggaaggagatcaataagaatacacgtccgaccaacgccggattgaaaatattattacctaatccaccgaaagacatcttgccgatgccgatcgccgccaacgctccgataataatgatccagaccggaaggttggaaggtaggttgaaggccagcaatacacccgtcaggatagcggagccatcgcaaagggtcggttcctttttcatcaggaatcgctggatcaaatactcgaatatcatacaggccagaaccgatacgaccgtaacgatcaacgctcccagaccgaagaaataaagggataccaagaaagccgggataagggcaatcagtacaccatacatatttttgcttatgctgtcgccaccatggatgtggggcgagggcgatacgtataaattattttccatgttgctcttgttttatgactttctagaccggataatacccataacttttcctttacccaaccggatctgatccagcaacggacggttggccggacaggtataactacacgacccgcactcgatacagtcggtgatatagttcttctccgccaattcccaattctggaattccgtggcgttcatcaatagggtagggttcaatcccatcgggcagacacctacgcatttggcgcaacggatgcaatcccggatcggcttgcggacagattcctccgtcgtcagtaataaaacaccggagcttcctttgcaaaccggcacctcggcgctgatcaacgctttacccatcatcggtccgccaccgataatcttacccgtattctcgggcaggccacctgcggcctcgatcaagcaactgatcggtgttcccatacgaaccaagaaattggaaggattagctaccgccttacccgtgatcgtcaccacacgctcgaacaacggtttattcttttgtaccgcctcgtaaacggcataagcagttcctacgttctgtaccacggcacccgccgagataggaagcgcaccactttttacctgacggcgaataacggcgtcgatcaattgtttctcgcctccttgcggatattgtaccttaagcggcatgatctctatacctttataatttaccgccaacttttgcagatgggcgatagcgtccggcttgttattctcgataccgatcacggccttgttcacgttgaccgctttcattaggatcgtgacaccgactaggatttgctcgcctttctccagcatcaacgaatggtcggaagtaagataaggctcacactccacggcgttgatgattacgatctctgccttgtttccgggaggcggcatcaatttcacctgcgtagggaaagttgctccacccagaccgacgataccggaagcggcgatcttatccacgatttccttggaagacagcgtgcactccttcactaaggtctcgctgcggtcgatcgtctcttcccattcatcaccttccacatctatatagatagcgggacgtttgtatccgctagcgtcgagagcgttatctatcttgttcactttgccggatacggaagagtggatgttcgctgatacgaaaccacccgccttggctagcaatgtacccacctttaccagatcccctttcttcaccacggcctgcgctggggcaccgatatgctggctgagggggataatcacctgtttaggcgtagcgagagccgtaattttcttaccggcagacagtttattctcggggggatgtatacctccgattcgaaatgtccttagcatactattagattttaatttagatttgttttttcttcacttgtagctttcggtgtggcttccggtttcacggtagcctctgccttcggcgccggtttcacggtctccgctttcggagcgggagcggcttccttgcgaggagggaaattcagctcatgaatagctcctgtcggacatacagccacgcatttgcggcataaacgacacttcgtataatcgatataagctacgttatttgttacggtgattgcctcgaacggacattccttggcacatttgccacagccgatacaagcgttggcacaagccttgcgagcggcggctcccttgtccttatttacgcaagacacgtaaatccggcgtgatttaggtcctttctttcttagctcgatgatattcttcgggcaagccttcacacaagcaccacaggaagtacatttttcctcgtctacctcggcgattcccgtagccgggttgatgtggatggcgtcgaaagcgcaggcgttcacgcagtcgccataacctaggcaaccgaaagaacaattcgtctcgcctccgtaaagggtagaggcgatggcgcaacttttcgttccatcataagagtttgtacgtgggcgggcctgacaagttccgttgcaacggacaacggctaccatgggttcggctgtacccgcctctttacccagtattgtagcgaccttggccatgaccgggccaccaccaacggggcagagcaatccgtctaatgagtcagcttttacgcaagcgcctgcgaatccggcgcaacccggataaccgcaacctccacagttcgccccgggaaggacttcctgtacttgtgcgatgcgaggatcttcgtagacttcaaatttcttggaagcagcgtagaggaaaaccgctccgaccgccccgattgctcctaatgaaataacggcaattaaaatcatgatatattatcaattaagttttttcaaagtaaatataaatcgtctttttagtttgtcacgcattaagtatagtatacagtaataaggcagtaaaagcgataaaccggttaacccgctcgtggtctcgtcccattgtagattcgtcccgattacgatggcccccacgactatcaccaaaggaatgacaaatgccagcaatacggcctgaagtcccatggaattttgtccgcatattatcacttcctcgtttacgtgaaaccgtcccgaccgatcgggtatctcaatgatcttatcctttttctcggatgccgagcacatagactgtgcgtggcatcccgagcatgcggattgttgggtaatgcggacgaagacggtgtcgccatcgatcttctctacaaatcctgtatgatttatactttcgctcatatttgtaatctcgacattgcaaaatcaaggcaaaagtaagtataatttagaaactatgtcacgattaacaaagtttattattcgaaatcttaaatcctagcttaccatttgtaattaaaaccgaaacttaacaactcattaagctggaaataactcttgttatcctctgttttttccactccatcgtcgtatctaaggtgaaaatagatacgtgtggagaaaaagcggctgatggccagaaccaaggtattctcgaactccccgatggtatgatcgccgtaagtggtaaagaaataaagacgggattgccagcttacgttacggttgaaatcgaaggcgaggtctgcgcggatcgtggaacctatttggcttagcttgttattgaactcaccggtttcctcgtttttcttgaaaccgtgacggctataatcgatctcttgtgtcgtatacatatatgtataggagatcggcgccaagttggtgctgaatttaatcttcttatgcttgtcggtaaattgtttttccagctcgtatttcataccgagaccgaagttgatagagaacggggctaggaatgcggcctgtttgatgcgctcgttctcttggtagttggtgaagaactgggtcttgaactcagcgtcgaacgtatagtaccatttgttgaacgcttggtagccgacgttgctgtgtatacggaatacgtcgtcaccgatcttatagttccttaaggtatccttcggtgccgtatatacgctggctttgaattccagttcgttcgttacttgtaccttatctttcttatagtcgtattttaaattgttcttggtgaacaggttcaagttgctacttccacctttataccagttctccgaaacgtagttctgggagaattggacggcgctctcgaaggccgatatccagtatctccgctccgggataaagcgggcgggagcgtctacgtcctcaaaattggcatcagcctccaccttgatcggcaagtcctcataaatattcttcttgatgaatttaggtttgattacctcattgggcagatccctctcggagtagcggaaataagtcgggtaattgttctgtacatatttgtaagccatctcctcgaattgtttgtttcgttccagatctttgaaaatggaatctgcccggtataggttatcatagggagtcctctccttcaacgaatcgaagttgtagaatatcaagttctcgggtaaataatctccccggaaaacgatcggcatgaacaaagggtttacgatcacggtatcccggaaggtcatcgtattatcgaaaatcgtggaggcgtctcgtaccagacaggcccaatacatcgcctcgtccgagatttccagctcgtctttcttcaagaaacgcagtaaattcgtgcttggggccaagggcgccgagtaagtcttgttttgcttctcgaattgcttacgaatgtctacgatgttgtctaattcctcttcgctaagattgatcgcaggaatcgtatcatccgatacgacttgctgtgcgggacgttgaactatcgttccggtaactagctggttctcttgactgtatgccgagcctccaattagtgaaagtaataatagcgcatacacaccatgcctcttcatcatcataataccttatttacatctattagttgtagtggtcgcaaaattagctaaaaagaatgatatataacatacgatttgatatttatctgggcaaaagttacgatcactgaggcaaagcaggtgtgtctagcgaggcttatacggacttgcctcagtactccgcaggaagtactggaatacttcggtcaaagtacttcagtacttcctgcgtagtaccgaagtaattccatgagaagtactgtctttagtgccgggcttcgggtcgggaatcggaagagtcctgccgaagcccgggtcggttctggagatattcagcgagaaataaaaacattaaatttggcatgtctcgatgaaaatcgctaactttgcggtttcgaaatgcaggtgtgcaattaaaaagataactaaaatattactatcgtggcagatacaaagtacattttcgttacaggcggcgtggtctcttccttaggtaagggaattatttccgcttctttaggtaagctccttcaagcaagaggttacaaggttactatccaaaaatttgatccttacatcaacatcgacccgggtacgttgaacccttatgagcatggggaatgttacgtgaccgtcgatggacatgaggctgacttggacttgggccattatgagcgtttcttgaatgtccagactacccgtgcgaataatatcactaccggacgtatctatcaaagcgtgatcaacaaggagcgtaagggggattatctgggtaagacggtgcaggtggtgcctcatatcacggatgagatcaagcgtaacgtgaaattattgggtagcaagtataaatttgacttcgtgatcaccgagatcggtggtacggtgggtgatatcgagtctctgcctttcatagagagcgttcgccagttgaaatgggagctgggcaagaactgcctttgcgtacatcttacttacgtgccttatatcgccgcggcgaaagagtataagacgaagcctacgcaacattccgtgaagcaattgcaggaattaggcatccagccggacgtgctggtgttgcgtacggagcatgagctgaacgcgaacttgttacgtaaggtggcgttgttctgtaacgtggccgaggattccgtgatccagtcgatcgacgtaccgacgatctacgaggttcctttggtattgcaacgccagaagatggacgaggtggtcttgcgtaaggtcggtatggaagtcggcccgactccggagttgaagccttggaaggaattccttgccttgaagagcacggctacggatacggtgaagatcggtttggttggtaaatacgtggaattgcaagacgcttataagtcgatcgacgagtctttgttgcaagccgctatttacaatcatcataaactggatttgcatttgttccattcggagaaattaaataacgagaacgccgccgagcaattgaaggatatggatggtatcttgatcgcccccggattcgggcagagaggtatcgagggcaagtttgccgctatcaaatacgctcgtgagcatgatgtcccttgcttgggcatctgcttgggtatgcagtgcatggtgatcgagtttgcccgtgacgtattaggtttggcggatgccaactctacggagatggagccgaatacggcacataaggtgatcgacttgatggaggagcagaagaacgttaccaatatgggaggttccatgcgtctgggcgcttacgactgtacgctgaaagagggctccaaggtattggaggcatacggcaaggagcatatccaagagcgtcatcgccatcgtttcgagttcaacaacgagtataagaagcaatacgaggccgccggtatgatgtgtacgggtgagaatccggagacaaatctggtagaggtggtagagatccccgccttgaaatggttcgtgggcgttcaatatcatccggagtacaacagtaccgtggtgaatccgaatcctcttttcctcagcttcgtgaaagctgctatcgaaaataaaaaataattggtgataaatggataaaaacacattaataggttttctgctgatcggtgtcgtattattcgcgtttagctggttcaacaggccaacgcctgagcagttggaggcacagcgccgttaccaagattcaatcgcgaagattgagtatgctcagcaactggaattgcagaaacaagagaacaagagtgctttagtggaggattcgttggagaacctgccggactcggtacgggcgcaacgtttgcagcagagcttcggcgtattcggcgacgctatggtgggcacggaagattacacgaccctgcaaaatgacgtggtcgagctgcgtatcagcaataagggcggacgtatttgttacgcacgcttgaaggagtatgatacgtataatgacgagcctctcgttttgttcgacgagaaagagtctaattttaatttcacgttggtcacggctacgaaccgtgtcgtgaatacgagcgatttgtattttaccccggttaaagggaatgacccgaattccgtgatcatgcgtttgaacaccggcgagggtagtcatttggattttacctataccttgaaaccggatgattatatggtgcaataccagattctgggtacgggattgaacggtgtcttggcaccgagcacgaatgccttggatttattgtgggtgcaggatatccgccaacaggaaaaaggacgtaagtttgaggatcgctacgtgaccttgaactacaagttcatggcggacgacgtggaacacctgagcgagtcgaagagtgacagcaagcagatcccgaaccgcttgaaatggatcggttataaggatatgttcttctctaccgtattgatctcgcaagagggctttgaggctactaccttagactcgaaagcgattccggagggggatgtgttgaaacaattcaagacgaccgcttccgtacctttcgacttgcaaggtaaggaggccacgaacctgtccttttatttcggaccgaataagttcgccttgttgaagtccttcgataagggagtctctgccgagcagcaactggatctggagaagttggttccgctaggttggggtattttccgttgggtgaatcaatatttcgtgatccctttgttcgacttcttgggtaagtttatccataattatggtatcttgattcttttgatgactatcatcgtgaagatcatccttttcccgttgacgtataagtcttatatgtcgtccgccaagatgcgtgtattgcgtccgcaagtggaggagatcaacgctaagtatcccggacaggataaggctatggaacggcagaaagcgacgatggagctatatagccgtgcgggggcgagcccgatgagcggttgcttgccgatgttgttgcagatgccgatcttaatcgctttattcatgttcttcccgtcggcgatcgagttacgtcaccagagtttcctttgggcgcacgacttgtctacttacgacgctatctttagttggaataaatatattccgatcatcactccgtatttcggaaatcacatcagtttgttctgtttgttgatgacgatcacgaatattttttataccaagtataatatggagatgacgaataccgggcagcaacagatgccgggcatgaaggccatgatgtacatgatgccgttgatgttcttggtgttcttcaaccagtatgcttccggtttgacgtattactatttcatctctacgttgatcacaatcgtgcagacattgatcttccgctatacgatcaatgaggataaattgttagctaagttggaggcaaacaaacggaaaccgatgaagaaatccggtttcatgaaacgtctggaagaggctcaacgagcacagcaggagacgttgcgtaaacaacaagaggctaagaaaaaacgataggataatagtaattgttgtccttgaaaaaggtccctttatctgcttattggtagataaagggacttttttgtatatcttggctcctctacttgaaaaacaagacgtcttgatcatgattctatttgtttatttgtatttattcaaaactttttgtttgtttgcattgttttgtattcaaaagattgatgaggaaattgattttttctatattgaggaaatagggaggttataaataagggattttgtcaatgacaaaaaatgaacgatcgcttcaatgggtaatagcgggaatattcttcgtagtatgctttgctttctttcaatggatttacccaaaccatttgttcttcaaagagcagatgaggatttttttgtataccaccgattattttatctcgttctgggatgagccggcttggttgagctgttatgtggggaatttcttgatacagttcttccatttgactgtgataggtccgttaatcgtgacgtgcgtgttgttgctcttatggtattactctatgcgggttttacgcaagttcggaaatggtaatatggtctccatatatgcgttgtttccggtagcgttagagtggggattgatttgccggttgtcgtatagtatagcgtctacgcttacgttgattttcgtgctatggctcttcttgggatacatccggattaagaataagaaaacgtccgtttgggtggcttttatacttcttcccataatttatagcatggtcggtagccggctgtttgtcttctccttgatggtgatattctatgagggagccaagaataggaaacggtggtggttctggctttctcttttgttatcgagttatttatatccgttgttcatgcgtcatttttatggattgagcattgaggaggcctataaatattcccatgtggatggcttgagcgtatatttccccgctttagcgttgattctagagatattcgctttggagattaaaagtatacgtaggatacgtctgaaccggcatagcttgcttattacctttttagtcgtatttggattcttttcatttgttatagcgggtacgaaccggaagcgggaaaaggttctggcagtagaccaagcgatctataggggtgattgggagcgagtcttggatttgtctgccggatttgattctcccgatatcttggtaagttattataggaatatcgctttctccaagaagaacgagttgccccagaatttgatggatcattatcaacgaggggcggacgccttgttcttaccgatcgatttgaggtcttctatacttcccgtgtttttcagtaatgaggtgtattatcaattgggagatatggatatggcccgtcaccgggcgatcgaaggaatcttgttcagccctaaacaaagaagcgtacggcagatcaagcggctggtggagattgatatgcggcgaggggatattgaggaggctagaaaatacctgaacctattggacgcgacgttattttatcactcatgggcaaggtcgaaggaggaacagttgaagggtgaggagaccttgtcgatggagaaacgtttgccgaggaaaagtgattgggagcgagagcacgacatactaatgtccatatccgattatccgggcgtactgtcaagtttggtggcggaatatccggaaaataaacaggcattggattatttgttgtgctattatttactgaacgagaatttgaatagttttaagaatgcgttcgatacttattataaaggaaaatttgaggttgtaccccgtttgtacgaggaggctttggtacaagtcttatctaaaagctcggacgaggaggtggacggttatcagatacctcaagatgttatcgaggattaccaagattacatccattgtaaatcgggtagaaaagcaaaggaggaattacgagaacgttattcctccacctattggtactactctgactatattcattgaataatagtgtaagtgatcagcggttcgcaaggaaggctaaggctttctccatgtcctccggtgtatctataccgatcgtttcttgctctgtgatgccgaccttgattttatatccgttttccaaccagcgtaattgctcaaggctttccgccagttctaaagcggattgaggtaattgggtgatttctttcagcacttgcgcacgataggcatataacccgatatgtttgtaaaaggtatgactcggcaaccattccgtatatttcttgccccggatataaggaataatagatcgactgaaatacatagcctcgttgtttttgttgagtacgactttcggggaattgggattgaatagggtactctcgaaatcatcgtccgaacggaaaggctttaccaatgtcgctatttgcgtgtttgcgtcggcgaagcaggttttgatcgtctggatttgctcgggatggataaaaggctcgtcaccttggatattgacaatcacatcatacccttcgcctattttctgataagcctcgtagcaacgatccgtaccgctacgatgttgatcggaggtcatgatgacttggccaccgaaggctttaaccgcattctctatccggatatcgtcggtagctacgcaaacggagtctaagacatcctttacttgctcatatacacgttgtatcatgggctttccgttcatatccgctaatggcttccccggaaaacgggtagaggcgtatctcgccggaataattcctataaacttcatcattctatatcgttttgttaactggttactacttttccttcgcttaactggatcaacttatcccgttcgcctacgatccatacgatatctccttcctcgaaaaccgtactaggaggcggattcttgatcgagctacttccacgttcgataccgattaccaagcaagcggctttatcacggataccggactctatgatggagcggccgatcaatcgggaaccttccgagataatgatttgctccatattcatctcttcctttcttgtgttcgattgctcggcgtatgatttcttgtagcgttcctccagatatttcctaaagtgctccagatcatcatctgcgccaactactaccagtttatcgaacgggtagagccgctcgtctcctcccggtatgttgattcgcttctctccccggataatcgttacgatatttacgttgcacttttgcctgaagtttaattctttcaggctttttcccatactgggggaattctgcttcacctcgaaatctgctaaatggagatctcgttctaataagtggttcgcgaaacgctggttaatcggggcttttcgctcttgctccacttctctcgctacaaggttactgaaaaaatgccgttccatcaagatcgactgcctctttagccgtttggagaatatcattaatacgataacagcggaggcgaccgccagcataattcctagcgcagcattcaataaccgtgcgacaggaagcatgacgagaccgatacagagcaggattctgaggatcacgagtgatactaggggaccccggttatatttattatcgttccataattgctggaactccacggaatgattctttttcatcatgatcgcccgcaacatcggggagatcagagctaggattaagatcaaggagattagacttccttggatgccgggcaaatgtttacagatgaacggagtcacgatttttagccataaaaagataagtactaggcagacggcggtataagtaccgacgatgcggaccaaggcttttagtaacttattccatgcgcttttttgacggatcgtattggaaccggatgaatatcgctccaagaactgtttccaattctccggtatgatccgctccgcccatttgtaggtaggttccgctagccggatcatataaggtgtgaagaatgtcgtgatcacggatacggcgacaacgatcggatacagatattgatccgtcacgtttaatgatagtcccaaacctgcgatgatgaaggcgaattctccgatctgcgctaacgagaaaccagactggatggctatttttatcggttgtccggacagtaatactccgaagctggcgaaacaaatctgtccggccatgactacgagcgtgataatgaaaatcgggattttatactcccagagcatctgaggatcgattaacatgcctacagacacgaagaaaatcgctccaaataagtcttttacgggttttaccaaatgctcgatccgttcagcgtcaatggtctcggccaaaatagaacccatgacaaaagctccgagagccgatgagaatccggcttttgtggcgatcataaccataccaaggcatagcccgatgctcacgatcaacagagtctcctcatttaggaagctttttgcctttttcagaaaagaggggatcaaatagatcccgacaacgaaacagaataaaaggaaaatgcctaatttgaccacgctatccagcatctccatgccttccacgtgtttacttaccgctacggtagaaagtaataccattaataatacggcgaatagatcctccaccaccaagataccgaatacgacaccggcgaatcgttggttacgcaatcccatgtcgtcgaatgccttgaagataatcgtcgtggaagacatcgataacatacctccgaggaaaagactgttcatatgtccccaacccagtgataagcccgtgatatatcccgctgtcatcatacctataacaacggttatggctccaatgacggcggttcctcccaccttcatcaacttcttgaaactgaaatcgagccccaaagcgaataacaggaagataacgcctatatcagcccagatacggatactttccacatctgtaactgtcggtatttgctcgatggaaggtccggcgagtattccggctacgatataccccaatacgaccggttgctttaactttttgaataacagggtaaccaacccggcggatatgagtatgaccgcaagatctgatattagcgcaggtatctgagacatcgtttattgttttttcgattgccaaagttaggtatttattttaattttgtgtctcaaaacagaagccaaaatgaagaagaaacatccgattgaagcgcttatagagcaaggggaacatcaacaacttgatttcaagtttgaggtgagcgacagcaagaagattgcccggacattgagtgcgttcgcgaatacagatggcgggcggctgctgattggagtgaaggataacggcgctatttcaggtgtgagaagtgaggaggaatattatatgatcgaggctgcttctaaaatgtatacgcatcccgaggtgccgtttacagctaagcgctgggatgtcaacgggaagaccgtattggaggtctatatcgccccaagcgatgagaaaccgcatacggcaccggataaagacgataaatacaaggcctatatccgggttgcagacgagaatatattagcgaacgaagtcctcatgcaagcatggaagaagcagaaaaccaaagaaggtacattgctgaaaataagtaagcccgtcgagatcctgttttcttggctcgacgagcatccttatatcagcataaagcaattttgccgtatcgcccatatcaattattatgcggcccgtaacatcctaagtgatttgatggctatgggagcgatggaatatgtcgtgatcgataaatgtattgcctataaacggatcgcatagactcgtttataggttgattacatagacttgcgcgctctcgaatctgacgactttgataggagtccctttctcgatgaagccagactccgatacgccgtcatacaactctccctcgatagatactttacccgaaggacgtaaaacggtagcggccgtgccctcttttccgatcagttgtgtcaaattggggctggataccgctttttccaaatcagcgtttaatgccattttctttagcggtcctttatgtcctattttgttggataaccatatcactaacgtgaatccgatacccagacctaatagaaccgttaaggcggctctgcccgtatccattccagatacgttttgaaaatcaaaaacagtattgttcagtaagctcatcgtaagtccgccgaccacgagaataattccacttatccccgctatgccaaagcccgggatcacgaatatctccaacattattaatataacgccgagaatgaataacaggatttcccagttttcagccaacccgtccatatagagaggagcgaagtaaaggatagccgctattatcgcggcggcggatggaaaaccaagccccggggtttgcatctcgaagtaaataccaccgatgataataatgattaataagctctgtattaccggactcataaagaaaccttttacattatcgaaccatgagggttcataacttttaatctcatagtccttacatccgatatattctgtgattacttgatccggactctcggcgatgccatcgcaataaccccatttgagtgcttcttgagaggtaagtgtcaataccttaccgctatcgatgaggttggggacgatcactctgtcatcgaccatcgcttcggcgattaaaggatctcttttccatttatagatcgtgtcgccgttttgtataagcgtatctttcccttgtgcctcagccgtcgaacggatcatggaacgcatataagattgatatttatcaggtagagccgcacccgtttgattgacaaccgttgccgcacctatattcgcccctttccgcatatagattttcttgcatgctatggaaattaaagcacctgctgaagctgcgttattatcgataaatacatatactggtatgggactatataaaatagccgttcgcatagaatcggcagattccagtaatccgccgtatgtgttcatatgcaataagatggcatcggcgttcaattgcttggcctctgataatccgttatggagataaatccacgtggtgttatcgatctctttttttatatcaatcgtatatattaaggacttctctttagcctctgattgaagagagattgcaagtattaatactatagctgttaatattgttaataaacgtttcatcttgtttgtattatattcgtttttaatatttggttgaaaattgtaactggcttgttgtaaatgttgatttttgtaacttgtgcaacttgtaaataatactcattttcagtaagatttacaacaaaaatattaagttacgatttttaatattaatatttatcaaagaactgtatatctccatttttaatttatatatttgttgcatccttcaatgtttgagggataatacttatacagtattaaactttatttaactagtaaaaatatgaatgcgttgcaatttcagaaaaaattattgagcatgcaagaaaacatgatgaattttgcgcttatgcttacagcgaatagggatgatgcccaagatctgatgcaggacacaacgctgaaggttttagacaatcaagaaaaatttgtagacaatatcaattttaagggctgggtcttgactgtgatgcgtaacattttcattaacaattatcacaagatcgttcgcacgcaaactgtcgtagatcaaggtgtcgacttatataacttggatgtcgtgaacgattcaggttttgactctccggatggcgcttatcaaattcaagagatcacgaaagcgatcaacggtttgaacaatgagttgaaggttccattctctatgtttttgagcggctataagtacaatgagatcgctgataaactggatgttcctctggggacggttaagagccgtatttttttcgctcgacaagaattacaaaaagttttaaaagattttcgtcaaggataaaatttactttatataaaagaagccgtcttgtgaaataagacggctttctttttattcggccggttggtataaatatctcttgatgcttcttttgggtgttttctcgaattcttcttgatacagcttgaaacaggtgattttactgtaattcggcatctcctcgtttacttggtcaatgttggtctgcatcaacttctcgatttcggaatgttgtatacctgccttatctacttgctcccaatcgggatagatgagggcgactagtttacctccttgggagatgatgagcgattccgctacatatagcatattattcaagcgatcctcgatctcttccggatagatattttgtccgctggggcctagaatcatggttttactacggccgcggatatataaaaatccatctttatcgagggttcccagatcgccggtacgcatccatccgtcaggcatcataacggctttcgtagcctccggattcttgtaataaccgagcatcacgttcatacccttcaccaatatttctcccaccttgttttccgggtcctctgaatcgatgcggacttccatacggtcgacgatacgtcctacggaaccgggcttaaactcatcccattgcgcataggagactagcgggccacattcggtcatcccgtagcctacggtatagcggaaatggatggaatgaaggaacgtttccacttctttattgatagcggctcctccgataacgatctccccgaagttccctccgaaagacgccgttaacttggcggaaatggtatccagcactttctggtctatataggggactttcaagagcaatttaatcaaaggcttctccagttcggggaataccttgtttttgatgattttctcgataatcagaggtacggctaggatcagcgccggcttgatcgtcgtgaaagcttccgctatgattttcgggctgggggtacgtgtgaggaagtgtacatggcagcctttattcacggaattcaatacctcgaatgccaatccatacatatgggccatcggaagcatacatacgatattatcacccggatggatgaacggtaaattgtcgtaagcgaattgcgtattactccataagctccgataggggatcataacccctttcgagaaactggtggttccggaagtataattaagtaccgctaattcttccggcttttccacgtgataccgaacatcgttcgacgtgaatgaacgagggtactttttaccgaaatattcattaatccgatctcttactacccggacttctttgcttttactgtgaatgatcgagaagttatccagcatcatgaacagtttcacgtcaggcatcatgcgttcattcatattctcccagttgctggaagcggcaaggactgcctttgcctcggaatgatttacgatatgatgtatattatccggtttgaattcatgtaggataggcacggctacggctccataagccaagatcccgaagaaacagatcgcccagttggaggagttccgtccaactaaagccaccttatccccctttttaatgccggcatgctctaggataatatgaaatttctcaattcgacgagctacatctttataatggaaggtatgtccattataatcggagaacgccgggagatcccaatgctccttgatgctattctctatgagtcctaaaaaacgattctccatactaatttatttatcaaataaccatatgacagggtggaaagttgtcaaaagccaaagatagtgccttttctgtaaattatgagtttcagtctgccggaaactgaaatattctttacctttgcctctccaaatagaagaatatggtagcacctctggtaaaacggatatggatctggtgcaggaatctgttgatcttcctgtttgtatccagtatattggcggtaatggtatataaatttgtacccgtatattatacgccattgatgtttattcgtatgtatgagcagcatcaggatgggaagaaaatgaaactcgatcatacgtgggttcctatatccaagatcgcccagcctttggttcaagcggtcatagcgtcggaggataacctgttcatggagcataatggctttgatgtggaacaaatccagaaggcacgggccgaggccgagaaaggtaaaagggtaagaggtgccagcacgatttcccagcagaccgctaagaatgtatttctttggccggggaaaagttatttacggaaaggtatcgaggtctattttaccttcttgatcgaatggatatggggaaaggaacgtattatggaagtctatctgaactcgatagagatgggggagggcatctatggcgcggaggtggtagcggaggctcatttcggtaagcatgcctaccaattgaccaaaagcgaggcagccttgatagcggccacacttccaaatccccggaagtttaattctgctaaaccgtcaccttatatgctgaaacgacaagcgaaaataatttccttaatgggaaaactgataaaagtagaaatgggatatggtgccgggcaagttgatcccggtaccggaaaggttaaaaaaagaaagaaatggagagcttccgttatcatgacttgggacgaatcgcttatgccgatgcgttagaatatcagacagctgctttcgaggtcttattggatgcgaaggcaacgggaaagaaagaggataatcaattattcttttgtgagcatttaccggtcttgacgatcggtaaaagtggcaaggactctaatttgcttattcccgaggaaactttacgggaacgaggggtctcgttttaccatataaacagagggggggatataacgtatcacgggccgggacagattaccggttatccggtatttgatctggaatattggaatctgggattgaaacaatacatccatatgctggaagagacgatcatccgtttcctatcgctttacgacttgaaaggggaacgtttggaaggggcgacgggtgtatggctagaccctgaagtaccggggcgtgcccgtaagatctgtgcgattggcgtgaaaagcagccggttcgttacgatgcatggctttgctttgaatataaatacggatctgagttacttttcattgatcaacccttgtggttttacggataaaggcgttacctccttggctatggagttgggggtaccccaagactttgagttggcaaaaagtcaattgagatcgattttcatggaaatcttcgcttgatatggcagtcattcatttcgctcctttgcaaggatatacggattcggtttatagagaggcgcatacccgagtattcgggggcgtagatacctattatactcctttcgtaaggatagagaaaggtggtttccggaataaggacttgaaggatatcgcttgcgatagaaataggcaggtacatgtcgtaccgcaattgatcgcttccacaccagacgagtttcggccgatcgtgcgtttattccaagagaatggatacaaggaagcggatattaatttaggatgccctttccctatgcaggtccgtgcgcatagaggctcgggacttttgcggtacaaggaagaggccgagtctttattacgtacgattgaggagttcccggatatttctttttctatgaaaatgcgtttggggtgggagtgtaccgacgagtcattcgtgcttctttccttattaaataagttacctttgaagcatataaccttgcatccccggttagggatacagcaatataaaggagctatcgattgggatggattctctcgtttttatgatgaatgtgaacttcccttatattataatggagatttagtggggctggaagatatccgaggaataaaggagcgttttccggggcttgccgggatcatgctgggacgagggttattggcctctccttggctggccactgagtttgtgtccggacaggtcttgaccgtgaatgagaggcgggataaacttgtcatgttccatgagtcgttgatggatgaatatgctgcccggttggaaggtggcgagcatcaggtattatctaaaatgaagacaatctgggattatcttttgccggaggccgataaaaggcttcgcaagaaagtattgaaaagtacttcccttacttcttatcagtcggcagtgaaagatttgttgagtctttgactacgggagggacattcgtagagtctttggggatcaagggtaaaagaggcctctttcttctcctgaaaatctcagagaagttcgtgaagtctttccggtacatgatacctacaccttgtatggttaatgcttgcttcaggccgaaatacatatctctggcatggttataagcctttagccggatctcaccggagggggtcaacttatattctaggtcgaactctccgataaaagtgttatttttgcctgtagtgaccgtatttctcataccgaaattaccattgatcaataagcggttgtttagcaactggctggataatatcatctcatattccgtgtcttccttgaaaccgtcctgtcccgctcgtatgtttgtccctatttgtactttatccgtgaaactacctaatagattggataattgcgctgagatagcggatgaagccacggcgtttaactcgctagacttataactcgtttgggcatattctggtgtgtagaatttatttaacaccagcaaataaacaatttgccgagtcatcatatcctctgtgtctataaacgctttgacttgacgctctaattcctcgttagagttcggaaattctaagtcgaaggaaatagacgggctgcgcaatgcgcctttaaggtttaagacgcaattgacgggtatgtttgttcgagaactttcttgtaagagactctgatccaagtctccgatatttgcggtcagattgtagatcgcattgatatccatatgggcattaaagggatcgccacggaaattgatcgtgctaccgtctctgatcttaaagtctttatggatgatttgctgtaagctgaaattatagtttccttgtacgatattcacgtcgccatacatacgaagatcacttcttgttccatattgtatttgtaaacttccactggcgtttcctttgatacggtctcccgctatcgggtccatgattagctctatatcggcatcgggtgtgatatcaaggaggaagttcattcgtagctcggctccctcgtctgtctcgtgtacgatattcaatgggtgtgtggacgtggaatctacgttagcggccaacttgcttttatcgacgaacgtgataaaatcatagtccgtagccgagttcttattcatgaagtccagataaatagcggtcttaggttcgcttttcatattaatatcaaagtcgatcaacttaccgttacccttgatctgcgccgttccactggcgaatacagttccgtaaatcagcggattctttttctggttggcgttatacatcaacatattattgccttgcacgtttacgaggaagctataatcccggaaatgcaaatggttgaacttgaggctgactttccctaggttgccgaattgatccttgaccgtgatattccgtaaattgacggatgtagagtcaaggtggacggaatcggagaaggtataatacgtatccaagaaatcaacgcctacccctccatccatgacataggcatctccctcgacattcagctccttaaaggggccgtgcaaatgtatacttccgaatccccggccttgcaagttctttacgaccgtatcgacaaagggctgcaagaaagctagattgatatcattggcatcgaaatataaggatagccccgcattgggtccgaccgggaatacatagccgtttacatccgtccaagtgctgtcgttcttgtagatgcttcccagcataaggatacctttctgtgcgttgtcccattcgctgaagagattgaggcgacccaagggggtttggttgaatgagaaattctttacttccagatccgtgtttagcatacggctattgaataaatcattcacgtagaacttaccggtagcctcacctccgaattgcaagactgggatattcaatacgtcgaagacataactcagctctatttgcttcaagtctaccaataaagtatctgccggatcttttgagatcgtcccttccatagataaatactgggtctcatgatctacccggaaatgctcaataccgatcttgccctcacgaatcgttatattcgccggattgatggtccagagcgtgtctttaataatgagggggcttttattcaacgtgacttccgtacgtaacttggccggccctttctcgctttcctcttcgacaaaaagggtagaggcggagatgtcggccttaaataaccgctctttattattcgcccagccaatcagggtgttcaccagattatctttagcgtctgctttgatatcaaggtagttacgcagtcccttgtcgttataattaatcgtttttaattggaggtttaccttatcgttcggattgtcgcagaccaagtaaccggattcgaacatggatttcccgagattgaacttcggaagccacgcctcgatacggaacttattataaatattattataatgtcccgtgatccgtccgggttgcaccatcgtgaacggtagttttaatgtcgtagaaagcgcttccgtattctcgatcgttaataggagggcgaagttattctctttcacgatttgttttttctgggtcgtgttgatcaaggctggcacatatcccttgaacgtattcataaggctggggattagcgtgttgaatgagtaagacccggtgacctctccattcaagatatcggacgttatggttaattgccggtcgagactatgccccgaggcaactacttcgaatttcttaaggaagaagctgctgggagtggtctcgaaagaaagactgtccaacgtgatgctaccttccagattatcgatattatctccggtgaaatccgcatttaaagccaaggagatattcggcgcctcatatttgtctgtcaggttcaatcggtccggccggaaatgatcgaggcgggcggtgaaattaaacaaggagttttgcccttggtgctggaagatgccttgggcgtgtaactcgccattgggatcgtttacatggatagtcccatcgaaactactcttcctgaaattaccggaaagatttatatccttgtatttataagctttataatcgaactccttgacttgtgcttggatatttccggagaaatttccgccaacaggtctacgggtatcgatattgatgtcgaagcgagcctccccgaaaggattattctcaccaaataactcatggagccgcaagttgctggaggcgatgcgtccccgtaggtaagcggctatattcttatccttgttgctaccgaatatcaagtctgtctgtatggagccgatggaagacgataattttccgaaagcgactaggttatcaaaaaagcctgatatctcgcccgtgaaattgatcgtccccaatttgacgaccggggccgggagactcttcggacgctcattgaagttattggccagactggagatgccgtctgtcgtgatatacatcttattcaccttccctaaaagatacgtttcctcaggatgggtgatgtttttcagttccatctggccgataaacagcatcttatcgctatacttcaaggtgaggcgcttcaagttaaaattattgatgtagccgtttgcctcggccgataactcaatcgtgtcggcgaagttcttgaacgccgggacgaaaggggataagtctttcaggcagatttgcgaaggtgttatattcaaatcgatcggagcgttgttcaagagagcgggaaggctatcgatctcgcttaaatcgatccgggcacgcccgatcttcaagtctgtctgcggcaagcgtacctcgaagtcctgcacgaaagcgctatcccggttcccgaccacgttcagcgataacttattcaaggagaaaccggatgcctcatcgaaactcatcttcttgatatgggcgttcacgctgtccttgttaaaagccttgagggatatcttggcactcaggttcttgatatcgatatgcttggcgttgaactttcccggggtctctttctcgctatccacgttatagctgaaattacctcttcggatcatgatggagttgaaacggagatcgatattcttctctttctttatcgaatccttgctggcgaaagcgtcgatgacgaattgcaggttcaaggggctttcgggcgtatgttttcgtaggttgaaggagaaaccgaacaaacgtaccgtcgtgaagacgaacttcccttccagtaacggcatgatctcgaatcccgccgccacatggttcgcctcgaacatgactttcccgtcttggtcttccagataaagcccttccagtactaggcgattgaaccattcgatatccacgttaccgatctttacgggcacaccgaggtggccggataactgggtcgtggctacttctgatactttgttttgaatataaggaattctcagtaagatgcccggcaacgcatagaatatccagaataatgtaagcagggtaatgattatgtatttaagtcctctgatatcttttctatttatttagcgcaaatctacaacaatatcgcgatagatttcgttaattcgcggaaaaaagaatgaagatatgagtataacgatattaggaatcgagtcttcttgcgatgacacttcctcttcggtgatccgtgacggcgtgatgctgtccaacgtaatagccagtcaagccgttcatgaggcctatggcggggttgtccccgagttggcttcccgtgcccatcagcagaatattattccggtagtagccgaggccatcaagcgtgccggcattgataagtccgagttgagtgccgtggcgtttactcgtggaccgggtttgatgggttctttattggtcgggacctcgttcaccaagggtttggccgcttccttggatatcccgatgatcgaggtcaatcacttacaggctcacgtgttggctcattttatcaaggagactccggacgatgaccatgctccctcgtttcctttcctttgcttgttggtttcgggcggtaactcgcaaatcataaaggtgaacgcttataatgatatggaggtgatcggccagacgatcgacgacgccgcaggagaggctttcgacaaatgcgccaaggtgatgggactgggttatcccggtggcccagtcgtgaatcgtttggcgaacgagggtaatccgaatgcctttacgttcagcaagccgcatatccccggatatgattatagcttcagtggcctgaagacctccttcttatataccttgcgtgatcatttgaaagatgatccggattttattgagaagaacaagcgagacctatgcgcttccttgcaagctacggtaatcgatattttgatgagtaaattgcgtaaggcggcgaaggatttgtatataaaggaagtagctgtcgccggaggtgtatcggccaattccggtttgcgtgaggcattcttggatcacgcaaaacgttatggctggaaagtgcatatcccgaagttctcgttcaccacggataacgccgctatggtagctatcacgggatattataagtatatggataaggagttctgtccgatggatgccgctcctttttctagggttgtcttataggaaaatagttttactatagagaaacaaaagtttcttctagggaaaacaaaagtttcttcctaatgaaactattgttttcccataatgaaactcctagtatcattataacaatggaagtagatgatttaccaatagagttagaagtagcggacgcactcaaatcaggacacctgatgatgggtacggcagagagttgtacaggcggaaagattgccagcatgataacctccatggcgggcagctcggaatacttcaccgggggcgtggtagcctattgcaacgaggtgaagcatcatgtgctcggtgtctctgaggcggacttgaacactttcggggccgtaagccagccggtcgtggagcagatggcccgtggaactatgcgggtattgggatgtgattgtgccgtcgctacctccgggatcgccgggccgggaggcgggactccctcgaaaccggtgggaacggtatggattgccgccgcttataaggagaggattctctccgagtgctatcatttcggggagaatcctcgtatggagaacattcgcttgtcggcagaggcggcgttgcgtatgttgctcggattgattcgtgagtaaagggactatcgcttaatgggcgatctcgtccacgatttgtttatagccttcctcgttcgggtgtaatccgtctgagaataaggattcgtttatcttgccgtcttcttgaagcaacttcgtacccgggttcttgaacgtgtaccatccggtctcggctatttgacggatgcggagattgaggttccttacccgttcttcttggttacggcggggcaagatgccgattaccttgatcttggcctccggctgccgttgcctgatggcggaaagcaagaaacgaatgccttccacgatctcattgtcattgttgattccgatgttattcgtgccgatcatcaatactacttcctcagccttgtatccatccaattcaccatgatagactctccaaagtacgttctcgatacggtcgaaaccatatccgagattgtggaacccagccggacgcatgattttctcccatgtttccatacctcgcacggacggtcctttgggctctcctccccagaaatgcgtgatggaattacctaagatcacccgtcgaggcgggttgctttgattcagcgagagaatatcccggtgacgtttttgccattcgtaattattgggttcccggcgctgggtgacaggcattgtggtagagaggtctcctttggggatgcgtaatatctcccgtactttccgctctacggcgttcgcctgtgtttccatgccccagtcggaaggatggacgtaatctacccaagcatccgggtgcagtcccagctcttctcgtgtaaggtagtagatatcttttatcccttgtgcctgcaattcctcgaatgcttttttagctccttcgttcatgcgcacataatcttgtagcttcgtatcgtcggcgagtgcgttgctatatccggcatgctccactaataagatcggagaggagtgggtggcacgtatttgcttgactgcgtctgatacgagttgcgtgatctcatctttgttctttggcgtgaggttgggcaggcagtcaaggatataaaggcgtgcgtctatctcacaaataaaatccaatacctctttctctaaacgtccgttaccggagaagcctaggttgataagcggatatcccagagaacgctgcaagatcgtgccccaagtcatgcccgggcgagaggcgcatgcgccttgggcgatcgaggttccgtataaaagaatcggtttctcgggcgatacggggataaacgtaagctcatcgttttcgggcacgccgatttccaaccactttatcgtattataaggaggcaggtagaggcggaactcatagcccctgtcatgatacagatctttgcctatgttcgtataatgatattgaagcgtatctccggaaggataaccgccgaaataaaatctccattggccatcgctatcgatactatatagatctacaccggatacgcctgtcgtgggcatatgtggcatattcagcggtccgcttacttgatagcgtacttttagttcaggggcgttgctgaaaaaatgaatcgccaacccggcggagttgcgcgataaatcccagacgggtttacgtaccttgccttcggctctttggggaagccggacgtagctgtctccgatctcttcggtccatccttggttttgtatgacagggaatccatattcgagcgggttgagccatttccattgtgcgtgggcggatagagccgtgaggcatacgagcgttaagaagattttgtgaagtctcatcattccggtattatttgttttttgttatgaatatgacaaagataatatatatttgtattcataaacaaacttaaatcaataaaccatgagtaaaaacattctatttgcttttctctttttaatgggcgctatcccgtcgatcgcccagaagaattaccaagtccagtctccaaaccgggatataaaggtggaggttacggtagccgataaagtcactttcgctatcgtacaggatcattcggaggtgatgaattctgccgtatctatgactttacaaggaggtgaggtacttggcgctaacccgaaagtcttgaaagtgacgaagacctcggtagacaaggagataccctctccgttctataagaaggacgtagtaaaggatatctataatgagatgcaaatctcgttccggggaaactacgggctggtttttagggtgtataacgatggagtcgcttaccgtttcacgacgaaaagaaaggaaccgatcgttattgccgatgaggaggccgtctataattttccctcggattataagacattcaccgcttacgtgaatagtacgaagccgacgttcgaggagcaatttttcaattccttcgagcagccctacgcaaacgagacgatcactggcctgaatgataaacgcctgaagatcctgcctcttttggtggatctgggagatggtcgcaagatctgtatcacggaagccgatctggaggatttccccgggatgttcttgaataacgagacgggaaaaccttccttgaaagcggttcatgcgccttatccgaaagtgaaggagcaaggtggccataatcagttacagatgttggtgaaagagcgtgagaactatatcgccaaaacatccggaacccgttctttcccttggcgtgcgtttataatctcccggaatgataaggagttggccgattgcgatatggtctaccgtctggcttctccctcccgggtaaacgatatctcttggatcaagccgggtaaggtggcttgggattggtggaacgactggaatctatacggtgtggatttccgtgccggaatcaataatcccacctataaatattatatcgacttcgccgccgagcatggcatcgagtacgtaatcttggatgagggctgggccgtgaacctgcaagcggacatgatgcaagtaataccggagatcgatcttcaagaattggtggattacggtaagtccaagaatgtcggaattatcctttgggcgggttattgggctttcgcccgtgatatggagaatgtcgtgaagcattattcggatatgggcgtgaaaggcttcaaggtggatttcttggatcgtgacgatcaggaaatggtgaactttgtttataaagcctccgaggtatgcgctaaatataagatgctagtggatttccatggcgtattcaagccgacaggtcttcaacggacctatccgaacgtgttgaactatgagggtgtgaatggtttggagcaaatgaagtggtcttccgagaaggagttcgatatggtgacgtatgatgtcacgatcccatttatccgtatgatcgccggcccgatggattatacgcaaggtgctatgcgtaacgccgccagaggtaatcatcggtcggtaaactcggagccgatgagccaaggaacccgttgccgccagttggctacttacgtgatcttcgagtctcctttcaatatgctgtgcgatgccccgtctaattataggagggaaaaggaatgtacggagtttatctctaacattccgaccatctgggatgagacggtctcattggctggaaaggtctccgagtatgtagcgatcgcccgccgtcatggtaatgattggtatatcggggcgttgaccaactggacgccgagggagctggatttagacctgtctttcttgggcgaaggtgattatactttggaattattcaaggatggcataaatgccgatcgtgccgcccgtgattataagaaagaggtaatcccagtcccgacagatcgcaaattaaagatccatatggctcccggtggaggctatgcggctcgtatccagaaacgataattcttttttcgtctaaagcgaccctgcctttcgtcgaataaacgcttgcgttcataggcgcaggcgttagattcgtttacttttataaaaaacggtattatgaaactcacgaggcaagattatatattggcgggaggacaggctttattgtggatcaccttatggctgattcctcctgcgatcgattttttcatacgctttaatccgagctcggctttcgaggtgtggaagattaatacggggttcattactccgttggctattgttttcaccgctaatttctatgtattggttccctatttgctttatcgggatcggaagatgctctttggtttgatgaatttgctattgatcacgggggctaacctatggatattttctcctaaggcggatttcccggacgaatggcgttcgggaatgtatatggtcgctttcggagcgttcttcttacatttgctagtggttggatgtgccgtgggattccgttatatcgtacgctggggcgatatgcagatgcgtttgaaagaggaacggcagaaaaacgccgaggcggaactggcttggctgaagaaccagttgaatccgcattttctctttaataccttgaataatatatccagcttggtccagatagaccaagatacggcgcaagaaagtatcgggcaattgagcgatttgctgcggtatacgctctatgagtcgaaccatgagctggtaccggtggaaggcgagatcgagttcatgagcaattacatcgagttgatgagattgcgctgcaatgagttggctaccgtggaagttgatctgcggatcccgcctaaaccgatgaggatcgttccgctcttgttcatctctttaatagagaacgccttcaagcatggcgtgaatagccgtaagccgtcgttcgtacgtattcgtttcaaggcggaaggagatgacctcgtctttacctgcgagaatagcgaccacccgaaaccggacgtgaaccgtagcggatcggggatcgggctggagaatctgaggcgtaggctggatctggcttatcccggtcgttaccgatatgatcaagcgcttcgggaaaatagttactttgttcaaataacacttcgagactgcttatgaaaacactgacttgcatgatcgtagacgatgagcccttggcggtgaagatgctggaggacttcgtaagccgtacgccttatctgaggctggcggcttccttcaatgatccggtactggcactctccacgttgcgtgagtctccggtggacgtgcttttcttggatatccagatgccggatctggacgggctgaacctctcccggatggtaccgcccagtacgagggtgatcttcacgaccgcctttaaggagtatgcctttgatagctatgaggtgaatgccctcgatttcctgctgaagcccatccgataccataagtttctcggagctgcggagaaggcccgccaatggtttgagatgaatagcgtgaaggaggagagaggcagccttttcgtgcgggtggatagccagttgcggcaggtggaaatctcccggatattatacgtgacgggtttgaaggattacgtgatgatctatctggaaggggaggcccgtccgcttatcacccacgtgacgatgaaggccatggaagagatgctgtctaccggtcgctttatgcgggtacatcgttcttatatcgtggcgttggataagatccgttccgttgatcggaataattgcgtttatatcggaaaggagatcatccacgtgacggatgcctacaaagaggcgttcaacgcttatctgaaagctgctcaaccttcttgaacttggatgcccattcaaagctccttacgatgggcattctaacgaccttacaatgcccattgtaggaaccttataatgggcattctaaactttatgtgtatattcgtgccttaattaagagaaaacgatatgaagaatagcattcctttagggtttatccggatctttatcctgcttatatgtctgacctcgtgcggtagcaaaaaacaacaaaaagtagctttgcccgccgatttcaagggaccgaaggagttggctcgcttatatggggtacgtatcacaccggaagataatatattcttgtacaacgagggggcccgttggttgggtgtacgtcataaattgggagggagcacgaagcggggcgtggattgctccggtttcgtatcgatcgtttatcgggaggtatacggaaaacagctggctcgttcctcggcggatatgctgaagtataattgcaagaaagtgagtcgtgccaaattgcaggaaggagatctggtattttttaagacgggtcgtggcgggaaacgtggcgttccgaatcacgtggggatttacttgaaaaatgggcgcttcatccataccagtacttccagtggcgtgatggtaagtagccttagcgaaccttattatacaagaacttggttaacgggtggtagggtaaaataaaattactaaattcgcgtcttagaaaaactattaaacataaatagaatatgttgacaatcaaattaatcactgaaaacacggatgccgtaatccgtggactggaaaagaaacattttaagggtgcgaaagaaagcatcgataaagtgttggaattgaatgataaaagacgtatcgcacaaaatcaattagataagaacctagcggaggtaaacgcaacctcgaagtcgatcggacaattaatgaaagagggcaagaaggaagaggcggaggccgctaagaaacatgtttccgagatcaaggaggtgagcaaggctttgcaggttgagatggatcaggctgccgaggagctgcagaacttactttatacgatcccgaacgtaccttatgatgaggtacccgagggtatctctgcggaggacaatgtggtagagaaaatgggaggtatggaaacggaacttccgaagaacgctcttccgcactgggaattggcgaagaaatatgatttgattgatttcgatctgggtgttaagatcacgggagcaggtttcccggtctataaaggacagggcgctcgtttgcaacgtgcgttgatcaacttcttcttggatgaggcccgtgacgccggttacttggagatcatgccgcctacggtggtgaactcggcttccggttatggtacgggacagcttccagataaggagggacagatgtatcattgcgaggtagacgacctctatttgatcccgacagcggaggtgcccgtgacaaatatttaccgggatgtcattctggatgagaagcagttaccgatcaagaattgcgcttatacacaatgcttccgtcgtgaggccggatcttatggcaaggatgtacgtggtttgaatcgtttgcacgaattttctaaggtggagttggttcggatcgataaaccggagcactctaagcaatctcaccaagagatgttgaatcatgtggagggactacttcagaagttggagttgccgtatcgcatccttcgtctttgtgggggtgatatgagtttcacggctgccctttgctttgacttcgaggtgtattccgaggcacaacaacgctggttggaagttagctccgtgtccaacttcgatacgtatcaagccaaccgcttgaaatgccgctatcgtgacgagaataagaaaacgcaactttgccataccttgaatggtagtgctttagccttgcctcgcatcgtagccgccttattggaaaacaaccaaacccccgaaggtatccgcatcccgaaagcgttgatcccttacactgggtttgatatgattaaataagcatcagatcatttatataaaatatcccagcattgtccttattgtggatatgctgggatattttttttgaatgaattagatgaataagtttacgttcgcgtcttccgcacgttccagataggtggctacgcctcctaggacaacgttatccatcagttcttcttttttgacgcccattacgtccatgctcatcgtgcaggcgatcatctcgataccattctctacggcttgtgccataaggctttccaagctgtcgatccgtttcttcttcatgataaggcgcatcatccaactgccggctccacccatattcattttagatagtttcagcttttcgctatttgccggaagcatccagccaaacatcttgccgaagatatctttagatacggcaggtttttcccgtttcttaatcacgttaagtccccagaaagtaaagaacatagtcaccttctttccggtggaggcagccccgttcgctatgacgaatgaggccaacgccttatcgaggtcatcgctgaaaacgatcaatgtcttgttgtcggcactattaccacctgtcgctattttgcattcagcttttttttttcgtaccgtggcggcgatcgtgcctcccttattttccagagagactaactctgccccggttatcttgcaccatgaagagacatcttttccgaaagcctgatctgttgcggtgatttccaatgactcattttcccgcaagttctcatagttctttttcaactgcatgatcggtcccggacacattaatccgcaagcgtctaccttaatcgccgtagctgccggagtcgatttgcaagagctacttttaccagatgccttatcagaaacagcttcggacgaacaaggtgcgcaggccggctcattcttgatctttgctgtcgctacactccaagtcttgtaaccaccggataggttccggacattcgtgaagccattttgagtcaggatgcgataagccaaatagccccttaatccaacggcgcaagtcactacgatcggtttatccttgggcagttccgccaaatgttctcttaactcatcaaccgggatattgatgaagccggggattgtccctaagctgtactcgtcacgggtacggacatcgatacgtacggtatctggcgataagttctggatttctctccactggatcgctttcgcttttcccgtaagcaggttctccgctacgaaaccggccatatttacaggatctttagcggctgaataaggaggagcatacgcatgttctaactcagtcaggtcatagaccgtacctttccgctggatcacttgcgctaacatctcgatccgtttgtctacgcctccgaaacctacgacttgcgcccctaacagtcgtccgtcttccggtgcgaacaatatcttgatcgataaaggcacggctcccgggtaatatcccgcatgcgaggctccatgcgtataggaggattgataagcgattccttcccgtttcaacagcttagcgttagctcccgccgtggcgaccgtcaagtcgaataccttggcgatagaggttcccatcgtcccgtcataagtttccttattgccggatacgatattatcggctacgatacgtccttgcttattcgccggacccgccaatgggatcaaggctggtttgcctgtcacgaggtggcgtacttccacggcatctcccaacgcataaatatccgggttcgaggtctgcatatattcattgacagcgataccgccgagtgctccgatcgtaagtcccgcttctttggccaatcgggtttccggacggacaccgatactcaataaaaccatatccgccgggatctgcttcccacttttcaaatgaacggtcacgcctccggaagtctcctcgaaacgagatacgccatcttccagcatcaagcctacctgcttgccgatcaattgctgatgtacgatagcggccatggaatagtcgaggggtgccatcacttggttagccatttccacgacagtgacgtggatacccagctcatgcaaattctccgccatctccaagccgatgaaaccaccccctacaacaacggcggtacggggcttttctgtgttcacgtaattcttgatcgtgtccgtatccggcacgttacgtaacgtgaatatctttttactctcgattccttcgatgcgtggacgcaaaggctccgcaccgggagagagcactagtttatcgtaagtctccgtgtaggtttctcctgtgccgagtttctttacctccacttgcttggattcgggaaggattcgggtcacttcctgctccgtacgtatatcgatgcggaatcgatccgtgaagcctttcacggtttgtacgaataatttattccggtcgttgatcgtgtctcctatataataaggtaatccacagtttgcgtaagaaacatattttccacgttcgaaaaggatgatttccgctttctcgtccattctacgcagccgggctgctacggtagctccaccggctacacctccaataatcaaatacttcatatctatttttatttaatttgtattatacatatttgttagtagacaataattagttaaaaaaagggattcatcccttttgtatgtattctttgagttgattgaacaggctgtccatgtttagctcggcctgcatcatctgttgtattttctctttcccttttggggtgagcgagaaaaacatttgccgcttatcctctttattgatgttcctgcggataaaccccttgttctcgacagaggtgatcacctttgagacccgggagtttgaaagaccgatataatcgcaaatcattcccgccgactttgcctcattatcctttaagcaacaaagcaacatggcctcgttgatggtgatagcatgtacttccgagaaatttttctcgaactggtacagtatcttatagatatcctttatggcgcaaattggttccatatttctttataacttgtttgatgatgcaaagatataactattttctaataaaaatactttctagtagaaagtaattaagactattgtatattatcctatagtagagacggggcgtgccccgtctctactactaggtatttcttttaatctctgttggagaaatatttcatgaattgtgaacgctcatacatcgccgggttcgggatattggcgtaattcaatttgccttggaattgggaaagggattggtaatgtgcctgatgcatccactcttccacgcaagtcaatacttgggagatgatttccgctccatgtgtatagacagcgctacacatctgtacggcggaagcgccggccaatagacatttaacgacatcttcccaatcatgcacaccggtagaggaagcgatactgattcccgggatctttccggatacgatagccgtccagcgaatcgtgtcactcaaatcggaatgattgctaaatacattacccgaaacgatctgcatattattgatgtcgatatccggctggtagaaacggttgaatagcacgacaccatcagcaccgtttactttcaacaaattaaccagtgaaggaatattgctgtaattctttccgatcttcatgataaccggaatcgatacggtctcttttaccttgcggatgatactgacatacgtatcccggatactctcgaaatcttcggtcagctcggtttccatgaagaacacgttcaattccaaagcgtccgctcccgctaactcaatttggcgggcaaagtcgatccaagcgtccgccttatagcaattgatgctggcgataatggggatcgtacataattccttgctcttcttgatcagttccagataatcatttacttgattcgcttttacataaccacggatataatccgccgcttcggggtaatcggagtcttgcatcaaagcctcgctctgcatctcgatctgctcttcgaaaagagatttcaatacgatagctccagcgcctgctttctcaaaatccctgttacgttccgccttattggtgagtccggagctcccgacgataatcggattgcgaagtgttaaccccgcgtattgggttttaatgtcaatcatgttgcctatatttagatttaataattactttaatattcccgttcgccaaagatactggtacccacccgtatcaaggtgcttccttcttggatagcgatcgggtaatcgtggctcatccccatggatatctccttgaaatcgacattatctttacagagcgtctctttcagttcgataaataaatcatggatcttgcggaattcttcccgtatcaaccccgtatcatcggtattggtagccatacccatcaatccgcaaatacgaatatgctggaattcggccaaggactcgtcacgcaacaactccttgcattcctcaggactgagtccgtgcttggattcctcttgcgccacatggatctccaataatacccggatcgtgcggttgtgttttttcgcttgtttattcacctcagccaaaagcttcaaggaatctatgctatggatcaaatgaataaaaggagcgatatcttttaccttattgctttgtaacgggccgataaaatgccattcgatatcctcaggtagtactttttgcttggcgctcagttcctgtgccctgctttcgccaaacacccgctgtccggcgttgtaagcctcccatagagcctccaccgggtgaaacttagagacggcaaccaacgtcaccccttgcgggagcgacgttttcagttgtactatgttttgagcgatactcatgtttttatcctctttgttcagcttgttgtttttgctccgctatcagttcctcgccacttttcttctcgccgggaatactgtttgcgtcgaatgggaatacatccatcaactgggtttccgttaccgaggcgatggtataatccgccaatgtacccttcattccatcttccaatacggcgatggcctctttcagcgtagtggcttgggcaagcatttgtgcggcggttttcttttccgctccgctcttctcgtccaacgtgataaaataaaccttgatcttatagaaccgatcaccattctcgttgaagaataattcggataaacgagctcgtttgatgtctgttaccgtaaattcacccgtgatgaaggggcggatctcctcgatgatgcgagcttccgcttccgtaaaagacagggcgtctaccaagtaaggctcggttacttttttctgcatgccattttccagcattttctcgtaagagaccttacattcaaaccaattgtgcatatgctttactttttaatttagtctgtactctgtttaaaacaacgtacaaatatagtggctattcgtcaataaaacaacttgccgcaaaagatataatttgtcaggatgtctaatttcgcgtgtttgttttcagttggaatttaaaatagagagatatggatgagaaagatttggtggaagggatgcgagagtatataagtctgttacaaaaggaaggacggtattcctcggcgaaaagttatcaggatgcgatgaactcttttatacggtatagcgggacggatcgtatcccatatacatatataaataaggatactcttcgccggtacgaggcttatttgttggagaaaggctgcatgcgtaatacggtctccacgtatatccgccgtttgcgttgtatctataacaaggcggtggagaatggcgaggcggcgtttatcccttcattattcaagggggtttttacgggtgtggaaagccagcgcaagaaatccttgcctctgggtgatttgaatcgcctgatgactgtccctgtaaaaggagagaagttaaggaagacacagttggccctttgtttgatgtttcaatatgggggaatgtcgttcgttgatttcgcccatttgaatagaggtaatatcaagaacggcatattggattacaatcgccagaagaccgggacctctatgcggttggaggtcttggatacggcggaagctatgtataaggaactggcaggtgagagggcgggaggctccggctatttatttccctttttaagtgggacgaagaacggccatgaggaatatctcgagtacaatgcggccttgtcccggtttaaccggaacttgaagacgttgaaagaggttgccggaatagtctcggatgtgacttcttacacgatccgtcattcttttgccatggcattgaaggaacaaaatgtccccatagagatgatcagcgagttattaggccataaatccatcaagacaacccagatttatctgagaagtttctcgttggagaaaatgacggtggtaaacaagtcttgctttgagaatgtatataattatatgccagaggtgggatgaggctacttggggagtagcgttcatttcacggtgcaaatgtagcaaaaaatagcaaataacaagcaatcattagttttagtttgtgctccggccttgattctccttaaatcttcgttcttattcctagtgtatagacatggcaatagagacgaaatgatctcgtatttcctacatcatcacgtcccttctaaaaatcgaacatacattcctgtagagacggggcgtgccccgtctcatcccctccaaatggtaacttaaagctactatcagacagtgggagacgggacacgccccgtctctacaaccgggtgataaccgttctcgcaccttttacgctactccccaagtagcctaagatttcaagagatggtaattttcagtaatgccatatttaaaaatataaaacgctgtttatcaagatgatgtaaatgattcttggtagggctctgaattgccgtggggtctgttttcgggccacgaaataaccactagaaaagataatcatagagatggatatattgacaggcaagtgctcggataggttcatggcgcatgttctgaagcgacgtgaccaagaggccgtccgctggtacgtgctcacgctccctaccgctggtggcgggcgtgacaggatcagcccctcgaaggggctggacgctgagctttcccgccgtgagcgtcgtggggaggccttgttcgagtatttctccccctcgtatgtcgaggcgaggaaggtgggcggcaagatggtcaacacgaggcaacccctgttgtacaactacgtgttcgtccacgcctcggaggacgagatcttccgcctgaagcgtacgcttcccctgtataatttcctcccccgggtttcctccggcgggcggtcttatttcccctacctctcggatcgtgagatggataccttgcgttgggtcgcggcttcttactccaacgagcttcccgtatacgtgccagatagcggccgcttgttgaaaggcgaccgtgtgcgtatcacctccggcccttttaccgacatggaggcggaggtggtggtgcagccgggcggtgggcataaggacgtgatggtgcgtatcctcgactgtctgtgggtccccttgttcgaggtgagagctggggagtacgagctgatcgagctgaacacggggggcaagcacgtgtatacccatttggacaacgaccgtctgtcggagggcttgcacggggccttgggccgttaccatgcctccggcgtggtagtggatgaggatgcctgtctggcccgtgaggtcctgcgtggctacgcctctctccgtgctgagaccgatgtgatccgttgcaagctttactctttgctccttcctgcctatctgcttttgggcgagtcggatgagttcgatcgtttgcgctccacgatgcgcagcatgctcccggtgataaaagcggggcaatcccgtgccttgttgctggtcacgctgtacggctgtacggacagcagcctctaccagcgcatggcgcacgagctggttgacccttggatggaggaggcctcgcccaagaagagtaagaccgtgttgatacgtcgtttacgtgattacgaccggtggctgaaacataatgaatagtgaataaggaataatgaattaaataattcaagattcaagattcagaaatcaagattcaaaaagaaatgtcttctcttccttcgggtatccggttaatgaacttgttgcgtgagcatttgacagagatcatggatcgtgagcgtgtgaaccgaaactcaatacacctgtattgcacgggtccctactgggtagcgttcgagcgttccgcctaccaactgcatcgtgcgttctcggatagcgagaccacgccgctgcgcctgttcgcctacccgttcccgatcgtgatggtgtctgtaacggatcgctcgctccgttcatatactcgcaagcatatcttgagaagagacgggtcggattacaagctattgaccgtccccgggtttcccttggcggactaccgtgaatggcacgccggcgaggtggagggattgcctttattgagtgagagcgtatgagtttttttaaggtcaggaggtgtaaaagatcctgatgtcagaaagaaaagtggattatggtaagtatggaaaaagagaaaactacgccattggggaaaagtgagagagaggaaccggagcgattcatcccggatgggatgggtatgttccaacgtaatgtaaaacgtataggggattgtgcgctggcgtttttggccttgatcgtcttctccccgctgtttttactttgttatatcgccgtaaaacgggaggatggaggcccggcgatctttaggcaagagcgtatcggtcgtttcggtcgcccgttcaacatctataagttccgcagtatgcgtctggacgcggagaagttcggtccggccctttacaagggtggggcagatccccggataacccgtgtcggaaaattcctccgggtacatcacttggacgagctgccccagttatggaatgtcttcgtgggcgacatgtcctttatcggtccccgtcccgagcgtaagttctacatcgaccagatcatggagcgtgatcctcgttatcgttacctctaccagatccgtccgggcgtgacctcttacgccacgctctacaatgggtatacggacacggtcgataagatgctccgccgcttgcgttacgacctgttctatctggaacatcgctcttggctgttcgatttcaagatattggtgaagaccttcttgaatatagcgttcggtaagaaattctaatgctagatctccccgtattcctcccttgcgtcaaagcaggggcaagccttacggatataggggctaagttggtaatgtcctaggatgcgtgcctccgggtaatcccttcgtaattgccgtagcagatccatcaaggtacagcgctgggcgtaggtccgggtatcggccggacggccttgttcgtcgagtcctccctcgtaacatataccgatacttttgtcgttccatccggctgcgtgcgccccgatctggttgaccggtcggcaacgatgtagctccccgtcccgtgtgatatagaaatgatagccgatatcggcgaatccccgtgccttgtgcgatgaacggagcgcctccacaggaaaatccctgtcatatcgtgtagccgagcaatgaattacaaggaggcgaacctccctgtaattctggtagaaacaataagccttacccatgataattgaagattgataattgaaaattgaaaattagagaatacaggattggatgccaagtgctcccgcgatggcagtagctacggcgatgatcactttgataatggtactccatacggactttttcatgaattatgaattttaaattatgagttatgaattaggaatcccggctgatataagaggaaagcttcgctttccttcggacggcctcagcggacgggcgtcaagcgaagagaccgtagcgagcgtgaggagcatccctgtctgagcgtagcgagttgggatgcgacagcgagcgtaggtctcgaagtagcccgtcagcgtcagccttgaccttttggttacttttgggtcaagccaaaagtgacacgttagatctcatcaggcgactccgaatccccacccccagcagccggcttcttcgagatatccacggtagtctccccagccttctccgcacggagcaccgcttgctgagccttgcgagtagccacaggttggaactccagcccggcgaagacattcttcaagtcctcgcccggtatatactggatactaaccccggtgatgtttgtagatgtgaatttctcaagactctccgcaccctcgttgaggatatggagccggaatttacccagttcgccgaaatccacctgtttcccctcttggagggcatcgagcaggttctcgacagtggagatcaataccgccaccacatccgcccggctgacggtggtttgcatggatacccggcggctcagctgcttgagcgatagctcaccattgatctgtgccgtggcgtacgctttcgccggctcgtctttcttgatagggttggtccgaagggacacgctgtaatttaaagccatagatttgataattaaaaattgataattgaaaattgaaaatgaaatcgatttgttttcgataacgaatgtacgacattcggtttcctctgaaatgaataccgctgacagtggatgaataagggagataaaagaggagatatgctgaaaaataaacatccgtatagttgttcgtgtcgtatgttttaagtatctttataccaataagataaatcttaaaaatgcgaacgatatgcgaacaggatatacacaaatcgacgagtggcccgtgcggccctattccaagcgggagctggccatggcctacgcccccgagatcagccccgtctcggccctgaaccggctggcggaatggatgcggtataacgatcgtctgacccgggagcttggtgatacgggctaccgctcgaggcaacgggtcttcacctccctgcaagtggagctgatcttccgttacttgggtcgtccttgagaggagacaccgccacccgtcggtataggcgagcggcgatgccggtactggcatcagacaacgccagtactggcgtagggctgcgacggtagtgcttacgggcaatgacagtagtggcatttccttcattccttcattccttcgggcgtccctcacgcacacacacgtgcgaggagaaagcgtactcgccccgtgcggtcttgatcagtgttcccttctccagcatccgtttgagggaggagtcgagtgttttctcgggtatgccgttcttcgctgcctcctccacggcctgccgacggcagaacatcattgggagggcattgaataaagcctgttcaggagaggtctggacagggatggcctcggaggtaggcaggaagcccagcacgtagctcgaatggcggtaaagaggctctatgagcgtgagtacggcttggaaatcctcgtcggtgacccgcaggtccagcttggggacgataccatccttgatattctcgatgggtatctccggggcgggggagagaccgggggaattgaaaatggaaaattgagaattgaaaattttttgttggggagggaggaatttctccaaggctctcaacagggctactatactcaggatccggcaggtattgatggcgatacgggcgacggcgcttcgcatggaacctccataggcgtaaccggcgtgggagaataactgggcgaaccgttggttgaacagctctttctgtttctcggatagccttagctggatcgtttggaccgatccgttgatcaggtccagtacctgtttccattgtgttccccatgtggcgaagcgtaggccgtaatcctcgctttccgaatcgaattggtccatccactcatcgataggtggcatgaaatagaataactggcgagagaacaggccgttctccgccgaggggattagcggctttacttgcgccggggttccacttagcaatacgctgagataagactcatcgcattcccggtactcatgattagtacgccggttgaaggccagtcgctcatggtcgtggcatttacgcaaggtatcgctccaatggccgtgatccgctccgatggcggtactcacggtatcagcctcggtctcgcagatcagccccacgccgtcggcctctatgaggttctctaagataccggtacccgagttatcgccggctatgaggaacatcttgaggggcggttgttccggctcgggcgtctcggagcgtttcttgccgagtgagtcccatcggttcttttcctcccgataattctttaggctgtctttgtagcgggccatcatctcctcgtgaataggttcagctaggcgcctgacccatgtcaaggctccttttccggaggcgggaggcgctacgatgaaggtttgtaggcatggatacatgtatttttgtccgtataacacccgtacccgcttgttcaaggtgcccccgagtacggtgaatactcccagcaggagtatgtcacgctgggcgatggagttcccgcaatcgatcatctgcttgatgaacgggggccacggataattcgggaaagcgggtggcaagtcctcacgtgcgtacgtatgtgcgtgtgtgggtgtgagaggggcttgaaggtttgaaggattcttgttctccctcgggtattggcggaaggtgtcggccagttgcttgtccgtttttacgccggcaatctcggcccagtggaagacggagcctaatccgttgcgcccgttgcccgctttgagggcgtggtcgtatagcttgtccgcttcttcgtagacgtatttctcggacaggcggcagatgcgatgaaagaacgtccttcccgcttccccgcaatcgttggcggtggcgaaggcgatcggcatatactcttggtaagtgggagcgatgttcgccccttggtgttcgatggcggcgacaagccgctctaaatctgataatgggttcatttgatttataagttataatttatgatttaaactgtcaacagtcacttgtcaactatcaactctcccgcagcttagcggagggatcatggcagaggaaacacgcccgtgagagatcggcgtttgaggcatccgcattcaatccgtatttccatttcaggtattcccatgccgatagccgtgccttatcaaaagattcctctatggaagccttgggtgagagccggtaggggacgagcagtttcacgcctgtggtgcttgggctgacgaaagctaggtccggtctcagtttattatcggcgaacaaggtgtctcgccagtggagggtttcctccggcgaggggagatggtcgatatcgatgacaaactctccggaaaggaataacaggcggtcttccttgcgataggagaagaccccggccggtgtgacgtatggcagtaagttttgcttcagtttgcggaaccgtttctcgtcgctcaaagcgtcctgtacgctgagcgttcgttctttcagccactcgttggaggtgatataggtatgcaactgtttgacactggtcacgccgctcggcacttgattggagatgggggcgttgaaaaaggacatgatacattctttcattaactcgtttgatttaaagtttaggctggtaaaggaaaggtaaaagagtgagaaaaaacggtccggtaagttatttgcacctatcggtaagttatttgcgcataaaagtaattcggtgacaggaaaaagaagaagatatgagtgaagagaaagcgagcccgtgtgtgctgcacatccatggcgagaacatacaggtgctgcccaatgccatgtttgccattcaatatatttgcttggacccgggagaaaagccggaggtcgtttcggaaaaagacgtgaggccggatccggagccgtgtgatttattagcctcctatatccaagacgaggaggtgcgtcacgacttcgtgaagcgaatcgcccaatgcccggatgtggccaccctctgccaaacggtgctgaccgaccttttcaacgaggtcttttgcgactgcgtggaaccggccaaacttatcaagagcaaggaattcatcaacgccatcatccccctgctccccttcaagcaaggcaagagcttgcgcaatatccggcgggcgatcgtgaagtatgtgctgggggaagggtaggtgttttggtttatgaatgattgcataattggatatttatttgtttctttgtcaatattctattttcttatgaagtcgagacaagagatcctagcgttattaagagacttcaaggttcgtaaaggcaaaaagtacggaatcttgaaaatgggtatctttggctctgtagctcgtgatcaacagacggaaagcagtgatgtggacatttattacgagggtgaggcgcaagggcttttctctctctcccatttgaaaaatgaattggaagaattgttgggaagcccggtggatatcatccgtcttagagaccggatgaatcagttgcttcgtaaacgaatcgagagggagggaatctatgtttgatacggagttggccttggataccttgtcgcagataaaggatactctttcaatgataatggcaagaacttcgcatattcataaggttgatgatttttatatgaatgagtctggtatgattctattggatagtgtttgtatgaaacttgtcgctgtaggtgaggcaatcaaaaatctagacaaaataacgaataaggaattacttcttaaatatccggctgtaaactggaaggatattaaagggatgagagatatcattgtccatcattattttgatattgacgcaagcgtgatactttatagtcttcaaaaggaggttccggatttgtactccactatttgtgttatgctgagggatttgtctcggtgacttatcacgataaatatagtttaaactcattttaaatcaagacactcgttttttgccctactggtttaccggcgggatgggagtggtttgtgtacttgtctttattcctagtaaatcagagaataataagcggatagctaagaatacgctgttcctctacgtgcgtatgctctttatcatggagagcaatttttgtattaaacacaattctttgtagcaatggtaacagactcacgaacttcgaaaagtataaaaaatagtttggtagccttggctttttattttattaatctggttcttcaatttttctcccgtaaggtattcttggattatcttggggcagagatcttgggactgaatactacggctaccaatttgcttcagttcttgaaccttgcggaattaggaataggatcagccattgcttgtacattatataagcctttattagagaaggatacggttgctatcaatgagattgtttccttgcaaggctggttgtatcggcgtatcgcatggatcgtgatagtgggaagtctcgtgttgatggcgtttttcccttggatcttcgctaagatgccgttacccttatggtatgcgtatgcttctttcggagtgctgctagttagtgcattgctgagttattttgttaattataagcagatcgttttatccgctgaccagaaagagtataagatccagtatagctataaggcctcgatgttgattaaaaccctttgtcagatattggcgattcgatatttgagagacggttatgtatggtggttggtattggagattgtgtttgcgatcgtagcttcgttggtgttaaatagaatggtccggcagacttatccatttctagaaactaaattaggacgaggtcgggaattatcgagaaagtatccagctattattaagaaagttaagcaattgttttttcataagatcggtagctttgctttgacacaaactagcccgatcattatttacgcctacactacactaactgtagtggcgttatatggcaattacatgttggttatccttgggattcaaactttgatgactgccatttttaatagcatgaacgcaggaattgggaatttagtggcagagggaaatcgtaaacagattatgtcggtgtttgaggaattattctctgttcgttttctattcacttgtataatgtgttttggagtgtttatgttgactcctttatttataatactttgggtgggtaatgaatatgtgatggataccatgacattgctattgatgactgttactttgtttattcaattaaaccgtacgaccgtggatgcttatatcaatgcttatggtttgtttggtgatatttttgctccagttacggaggcttctatcaatatctgtttgtctgtgttattaggatatttttgggggttaaatggtgtattgttgggtgtgttgataagtttatttcttgttgttttttgttggaaaccttattatttgtttcgaaaagctttgaaacaacgattgaaattgtatataattatgtacgttaagcatttaagtgttgcaattgttagtataatacttatttattctgtattgaaatttgtcccaatgcactcatttgaaagtgctttatcttcttttgtatatggagtgtttattacgattttgtatacactcattcttttatctatgttttattttttaggacttggtttgaatcgctttattcgaagaattcaaagtatgatgaatgggagaaaatagtatagtgatatataggttgtatgatacattaaaaagttagctaagataggctgtatggtttataatattcaaagtaaaaaatgtttaataaatataacaaatgatacctgtaatttctattattgttgctgtttacaaagcggaatcctgcttgcggcgttgtgtagacagcctgctagcacagacttttcaagactatgaaattttgctggtagatgatgggagtcccgatcgttccggagaaatttgcgacgagtatgcccggaaggacaatcgtgtccgtgtattccataaagagaatggtggagtagcgtccgctcgacagtgtggaatgaacaatgcaagaggcgagtacgtgatacacgctgacccagatgactgggtggaaccgaatatgctggaggaactatacggaaaggcaaaagaagaaaatgcagatatgataatttgtgatgtatggcgggatacttccaagaaatctacttacgtgaagcaacggttatttatattagagcattgtgtgatgctaaaagatgtgttacagcagctgcatggcagctgctgtaacaagctcgttaagcgagcttgttacagcaaatatgatgtgaattttccggaagggttgtcatatggagaagatacttatgtcagtgtatgcctgttggcacatcctataaagatggcatatgtaccaaaagcattttatcattatgtccaaaatgtaaattacagctcgttaacacgtcgtcctgtgaaaattttggtagagcaatgtgaaaaactctgcgatttacttcgttgcaaattatcagagaatcaatttaaagaaatttatcctgctttacgatataggcaagcatgtgttatcctaacatctgcaggagaaaacccatatatcgtaacatttaaaaaagattttgaaggtgtgagaaaagctattcttcatcaaaacttctcttttaagaggaagactcttttttggatagcattctatatatcaccttatattgcacgttttttttatactttttgtcgttaactattgttgaatcttatcataaacagttagcaattttattagttttatgtctgatgtctcaagaatagatacatatggtgcaaagctggttttactgccatatatgttggcaataattggcagttgtttgtataccattatattgggagtgtataacggggatttcatacaacgtgatgtgttatttccgttacctgctttgttggttatagctgtattgactatcattccttatataggtatatatggattgtataaacggtataggtctaaagagacagaaaatgtacccgataagttcaaggttgcgataattcgcaatattacatggcttttattgttggttcatataggtctactttttactggatatggccaaatgggaacttcgatagaaatagacggcggatttttttcttatatccgttcggctttcttcaagttgatggtacgtccatgggttattgcttatttgctgatttccaatagccgtaaaaatcttgctgtaactgttcttttgttttctattcacacgattcttgctcattctttaggagggttctttattctattactcatcttattgtttaggcaaggcaagaaggtgaaatcttttgtgaagcgaaatttcttgtttgtattagcgatactctatttggttccgattgttgtctcttccgcttataatgttcgtgcacaattaaggggacaaggagggatgagtgaaacttcaaacattgatataatggttgggaaattatgtggacgaataagtagtttttccaacagtgcctatattttacagaactcgtcacaaaatgtttatgatttggaattaatccccgattttttttacttttatgatacattacattattggggatacagacctgagtttaagagtactggattctatgtggaagagcaaataaagcattcaaaattagaaaacagttcaactatgcctggtgtcataggggttttaataatgtcatatgttaaatctccttacatatttctttttaacctgtttctgatgacttttcttcttattataatatttaatctaacaaagaggataggatttccaaatgcttctggaattgcttatattttaacaatagagtttgctacaagtggagatatttcagctctttctaatactatatataccctgctgataatatggtttacattgtctatatcaaacataataatatggaaatgaaaaagaaaaagaaagtacttgtgttatatccatcggggaattatctatatcctacgacaggaggagaattatatgattcttatctttttaaaagaatacttttttctggacagatagatatgtccttttttacaaaggatcatactagacacattaataagtggttgttgcctgcatacatactctggtcgtgtaggagaatcggttcatacgatgctgtattcttaaatagcagttggtttgctcaatctatttggttgctttattttttcagaatattttatcctaagttgaaagtctacgttattcatcatcattttcggtatcaggaaatgtctggaataaaaagactattacaatacatgttggaatggctggggctgggggtgtctttcgctgttataactcccaatccatatacgcattccttgataaagcagatgagaccagatagtcgtactgtttttcttgaaatggcattcaagaaagatgttccaacatcttcttgctatgtgttaaaacggttattatttgttggtactgtatatcaacggaaaggacttttatatctactggaggcaataggacagatgtctgaaaaggaaagatctgggattcatttggatattgtgggagatctttcttacaaaaaatactataaacgtctgttgtctttggttcacttatatgggttggaggatgttgtaacttttgtaggacgtatatcagatgaagaattgaagtcatattattctcgagcatattgttttgtatttccgtctttgttggaaggttatggtatggtgttaattgaagcaatgtcttacggactgccagtgatagcgtttgacaattcagctataccttttacagtaaaaaatgatagaaatggcatattagtgagggataaaaatatattggatcttaaaaaatccattttaaaactatgtgtagatacagattaccatcggaaattgtgtgatggtgctctagatacttatcgcaatgctcgttctctttctgatttggatgtagatatagaaaattttgtaataaaggaactaataaactaaatcaatatggaagtgattccggagtgtgaatatttattacttattatagtttacttggtgataaactctcaataaagggctcatagttaaaagtaatacattcgttacttacaaaaaataaaaattatgtatagcatcgaatatttagaacgatttttttagtatcaatcagaggtatcaccaagtagtgactctcttaagtccttttgtgaaaagaataaagtgccctgtaatatctttaaaagtggtataaggttattcgtgaaagaatagccgaggtaaaggttgacgctaggaggatccatctttcagtaattctcctcgttctttcattactatagatgaatatttaatatctaataaataagttgtaatgaattctattaatattattaatattctaggagtttatcctccgcctttaggaggtgtgtctattcatgttaagcgattaatacatggcttaaataaatatagattaatctttctaataaattatggatctaaagtgaaaggttttgaatatatagaaaatatacattcattgccattttatattttttctttattgtggaagagaagaaggattatacatgttcattcaaattcatatgtaatatttttactccttttgctatttggaattcgtcataagattggtgtgacattacataatcaaagaatagcgaggatgaagtcttcgtttaaacaatttgtgtttacatcgttttttcatagagcggattttattattttgaatagtaaaaagtattcagatattcttgttcaaaagtatagattgtcagaaaatcgattgcatgtgattcctgcttttattcctccgatgaagtctgagtcttgtggattgccaaagggggtgttagaatttagaaaaaaatgtaattatctgatttctgcaaatgcttttcgtttggttgttgaagatggtttggatttatatggattagatcttttgatagacttgatttatgatttaaggaaggatggtattaatgcaggtttgttattctgtttgccagaaataggtaataaaaaatattatgaggagcttcagaaaagaattgagaattatcatttaaaagagtatgtgaagatagtttctggtgtaatacaaaacgcatttgaatattggaagatttcagatgtttttattcgtcctactactactgatatcgaggggatatctgtaaaagaggctttgtgggtaaatactcctgctatagcaagtgatgtatgtgagagacctgcgggaacattactttttgaaaacagaaactatttagatttaaaggataaagtgttgaaaatctataagaaggataaatatgagactatagattttagagaaaatgtacctgatgttgtaaatgaaatattgaaaatatataattctttatgaaacaaataattcaagacctcaaatccggatcaaccatcttggaagaagttcctgttcctcaagtaaaatccggctatgttttaatccaaacgactcgtacgctagtatctttaggaacggagcgtatgctcgtggagttcggaaaggcgaacctgattgataaggcacggcaacaaccggataaggtgaagcaagttttggacaagataaagacggatggtttacaaccgacactggaggccgtgttcaataagctagggcagcctttgcctttgggatattgcaatgtcggacgtgtagtagcagtcgggaaaggtgttgcggaattcaaggtgggcgatcgggtggcctcgaacgggaaccatgcggagtttgtttgtgtgccgaagaatctggtggcgaaggtgccggatgatataacggatgaggaagcggcctttacggtgattggctcgattggtttgcagggaatccgcttgctgaatcctcagttgggagagacggttgtggtggtcggtctgggattgatcggtctggtggcggcgcagttgttgagagcgaacggctgtaaggttatcggggtggattttgaccagcagaaggtggatatggccgcctcgaagggaatcgtggctgttaatccgggcagaggtacggatccggtaaggttcgtggaggattatacggggggtatcggtgcggatggtgtcttgatcacggcctccacgcaaaaccatgaggtgatccatcaagcgagtgagatgtcccgtaagaggggacggatcgttttggtgggtgttgtcggattgaatatgcgaagggatgacttctataagaaggagttgagttttcaggtatcttgctcgtatggggccggacgttatgacgaggaatatgagaacaaggggcacgattatccgttggcttatgtccgctggacggaaaagcgtaattttgagacgatactccacgcgatctcttccggatcgttggatgtcaagtcgttgataacggaagaggtggacttggccgattatgaggagatttacggcgatatgcgtaagaaaggatcgatcgcttccatattacgttttcccgctgattcgaagatggagtcagttgtctctatcggcagtaatgcctttgtgagtggaaatggcaagatcgggattattggggcgggtaattatacctccgccatgatcataccttgcttggctaaggcccatgctagaatcaagtatatagcgagcgcccaaggattgtccgccaagatattggcgaggaaggcgggggcggagaacgccacgtcggactatcaaaatatattgaaagatccggaggtggatttggtgatggtcacgacacgccataacctgcatgcccggatggtgatagaggctttacggaatgggaaaagcgtattcgtggagaaaccgttatgcttgaatgagacggaattggatgatatcatacgggcttatcaaggggctcctgagggcacgaccttgacggttggttttaaccggcgtttctctccgttcgccgagaagatgaggcgattgctaggtgacggacctaaaaatatagtggcgacgatgaacgccggatttatcccgcgggaagtgtgggtgcatgatcttgagataggtggagggcggatcattggagaggcttgccattttatcgatctatgttccttcttggcgggctcggaggtcgtggcggtctgcatgaatgcgttaggcgaaaatccggaggagaatacggataatgccagcatattgcttcgttacgcgaatgggacgaacgccgtgatcaattactttgcgaacggctcgaaatcgtacgccaaggaacgtgtggaggttttctctcaggagagggtcttggtcttggataactggcgtaaattgaccgggtatggttttaagggtttctcatcgatgaaggccggtatggataaagggcaaaaacgtcaatttacgttgttgaatgaacgtatccgggagggcggtgagccattgattccatttgagagtatattgaatacgacgaaagctactttcgcttgcattacgagcttgaaagagagatgttgggtgaatctctaaaattatatatttctactcttcggaacttgagatctcgccaagttcgttatcaagtctggtataggctacgggcatatattaggaaatacaggagctttcggtatgtattgtcattaccgagagtgggacatcctttgtcttttaaacttttcatctcgaaatatacggacttggatagtgttacggggcatttctctttcttgggtacggaatccgcttttctaggatggaacgatgagagctttggtaagttatggtcctataatctaaattatatggactaccttcatcaagaaactatatctttcgaacaggccgtttgctggatcgataagtttgtcgatgaaatagaggggaataggaatggtctggaaccttatccgatcgctttacgaggcatcaattggatcaagttcctgtcgaaatatcatccttatattctggctgagaataaacgaaaatgggattcctccttgtatgcccaatatcagattttactggataatctggaatatcatcttttagggaatcacttattggaagacgctttctccttgttatgggccgggctttattttaaggatgagccgatctatcaaaaggcgaaaggcttattgttgcgggaactggaagagcaactccttccggatggcgctcattacgagcaatcaccgatgtatcattgtatattattggatcgattgctggattgctataatgtctctgtaaataatttgcggtttatagggcaggaaggtttgaatgaacgcttacgagaaaaagccggtggtatgttgggacatttagcctctgtcgtttataaagataatacgatacctctcctgaatgattccgctgagggaatcgcgccttctccgactcaattgtttgcatacgctaagcgattggatatggactgggaaaagcttccgatgggagcgtgtggctatcgaaaattgatggcgggccattgggaggctatcgtggatgttggagacataagggcctcttaccaacccggccattcgcatgcggatacgttcaattatgagttgcggatagggggtaagcctttcgttatggataccggaatttctacgtatgaaaagacagcccgtaggcaatacgagcgtggcacggcggcccataatacggtggtgctaggggataagaactctagcgaggtatggggaggctttcgtgtggggaggcgggcaagggtgacgcttcttaaagattctccgaatgaggtagaggcttggcatgatggttttggctcattgggtaggcatctgcgaaaatttacgattgataaggatcgttttaggatagaggattctgtctcaacagccgtgaaagccgtaagcttgatccatctggctccggatgtggagatcatatcttgttcacgaaatgagatagtgacgagtatcgcggcgataagagtggccggcgcatcctctgtcgagattgtagatgaccaagtgtcatttacgtataaccgttttcacctatctaagacaattcgtattcattttgtgaagagactttcttatacaatcggttgatcgttattggaccattcttgatctgcctaatatcttacttaaaaaataacacatatttcttatgaaagcatgtttcatggggttgggctatattggcctgcccacggctattattgccgcaaagcacggggtggagatcgccggcgtggatattaacgctcaagtggtggaggttaccaaccaggggaaattgcatatcatcgagccgggtatggaggagatgttgcgggaggtactggcctccggacatttcaaggcgtacaccgagcctcgggtgagcgacgcttatttcatggtggtacccactcctttcaagggggatcatgagccggacgtatcgttcgttgagtcggctacccgtatggtgcttcctttgttgaaggagggggatttgtacgtgatcgagtctacatcgccggtggggacgaccgaacggatggctaggttgattttctcggagcggccggaactggagggcaagatctatatcgcttattgcccggagcgggtgcttccgggtaacgtgatccatgagttggtgcataacgaccgggtcatcggcggcatggacgaggcctccacccgtaaggcgatggagttctacggccagttcgtgaagggtacgcttcacccaacgaatagcaagacggccgagatgtgtaaattgaccgagaactcaagccgggacgtacagatcgctttcgccaatgagctgtcgtttatttgtgataaggccgggatcaatgtgtgggagctgatcgatttggcgaacaagcatccccgtgtgaatatcttacggccgggttgcggagttggcggtcattgcatagcggtggacccttatttcatcacggcggagtttccgatggagagccgtatgatctcgacggcccgtgagacgaataattacaaggctttctggtgcgctgagaaagtgaggaacgccatgctgcggtttgagctgaagcatgggcgtaagccggcggtggcaatgatgggcttggctttcaagcctgatatcgatgacttacgtgaatcgccggccaagggaataacgacgaaggtgttgcaatcgtgcaacaacgctgatatcatggtggtggagccgaacgtttcggagcataagttgtttaagctgaccccttataaggaggcatacgagaaggcggatatagtggtcttcttggtgaatcatagggagtttgcggggttgaattatcgggatgacgtggaggtgctggacttttgcgggacattcaagaaataatcgttcgctaaatagaagaatacgcagtaatgagaaaaataatgttagtattcgggacccgtcccgaggcgatcaagatggctccgctggtgaaggagttccaaaaacatccggagtcgttcgagaccatcgtgtgcgttaccggacagcatcgggaaatgttggatcaagtgttaaaattgttcgagatcacgccggattatgatttgaatatcatgaggcagggtcaggacttatatgacgtgaccgcccgtgtccttaccggtatgcgtgacgtgttgcgtgaggcgacacccgatgtcgtgctggtgcatggggataccaccacgagcacggcggccgccttggccgctttctaccaacagatacctgtaggtcatatagaggccggccttcgtacccacaacatctatagcccatggccggaggagatgaaccgtcaggtcacggggcgtatcgccacgtataatttcgcacccacgcggttgagcaagcagaacttgatgcgagaggacgtgaatccggactcaatcttggttaccggcaatacggtgatagacgccttacggcaagtggtgactaagataaagacggacgctgagctggacaaggagttggaaggcgtgcttttacgttcggggtatgacgtgaaccgtctggttgagggtaagagattggtgttgatcacgggtcatcgccgggagaacttcggtgatggattcatccatatgtgtaccgctatcaaggacttgacccggaagtatccggaggtggattttgtctatcctatgcacttgaatcctaatgtgcgcaagccgattcacgaggtattcggcgaggatctttctcatttggagaatatgttcttcattgagccattggaatatctgtcgtttgtctatctgatggagaaatcaacgatagtgctgaccgatagcggcggtatccaagaggaggcccccggattgggcaagcccgtgttggtgatgcgtgatacgaccgagcgtccggaggctctcgcggcaggtacggtgaaactggtcggaacggactatgataagatcgtgagcgaggtctcggcgttgcttgatgatactgtttattacgatgcgatgagcaaggcggttaatccctatggggatggattggcttgcggaaggatcgtggaatttttgaaccggaaggaatgagggtcttgatcgtttctccctcttatcttccagagatcggtgcggcaccctcacgcattacgaacatggcggagggactgtctggcttagggataaaggtggatgtgttgacttgcttacccaattatcccaagggacgtatctttgatggatataggggggctttttccaagacagaggatgtaaacgggataacggtcttcaggtactggacgtatgcctcgatctcgaagaaaccgttggtccgtcttgccagtatgtgcgctttcgccacgaccctttggtgtttcgctctcaagcgtaagcgtataaaatcttatgataaggtgatcatccagacccctcctgttttggcggcggcctcggccatgttgctttttcgttgctgctaccggaaaaaggtggtactgaacgtctcagacctttggccattgtcggccgtggagctgggggccatgaaagaggggggcgtttatcatggggtgatggggcgtatcgagcggttcctttatcgtaaggccacggcctgtcaagggcagagtaaggagatcgtggattatataaaacggtatgagccgggcaaggcctcgttcttgtatcggaatttgcagcatcgttttgttttaccgaatcaaaccccttcttctcgaaagcctttcaggatcgtctatgccggtttgctgggcgtggcgcagaatatattggagttgatagagtgtgtcgattttaaagggatgggagcggagcttcatttatttggagggggcaatcaagccttggagatagaggattatgtgaggacacatgataaaggggtcttttatcatggctctttgcccaaggaacggatgcgtgaggagcttacacgttaccatgcctccattatccccttgacggttcgtataaggggggcggtaccttctaaattatttgatttgctgccgttaggcgttcctatcttgttttgtggaggcggcgagggcgaggagattgtaaaggagaatcagttgggccttgtctcggcccccggagattatgagcgactttctaaaaatgtacaagccatgagccacttgccggatgaggagtatcgacagctaaaagcgaactgcttaagattatcccagacgactttctgttttgaaaggcaactggaggtgtacaaacgttttttatcggctttctaatttcaggatgaaatcccttaaacattttgcagggatgccctgttatagatatagtagtgtgtttttcatggtattagatttttagattagtaattaggttgttcattcagttcgggagaataggatgttggtttctaaatatgagagccggaaaggtgagaatgatttctctcgtttccggctattcttttttatttaaaactcgtcattggcgtaaagactcaataggtttttcagctcataatcgaatatctcgtcatccttgaagaagcgtttcaattcgatctcggctgtctccggtgagtctgatgcgtgtacgatattctcttgtacgctcatactataatctccccgtatcgtaccgggagcggcgtttctaccattggtagtgccggccaaggttcttactacatgtatggcatctaccccttcccagcaacatacaattaccgggcatacactcattgcgtccttgatacgttggaagaaaggcttttctttcaggtgggcgtagtgctcactcaagatctcgtcagttagccaaaccatcttcatgccggccagacggagtcccttcttttcgaaacgggttacgatttcaccgatcagccctcgctgaacggtacaaggctttaaaataaccaatgttttttccataagatttatattaaaagattaaacaaatgtttgatgtcttgaatacatgttaaccttgcggcgttttatgaatgatagaggaataaaggatgaaatgttttttaggatatttcaagtatatttctatcttattcctccgcaagttaatgggaataaacaaataaacgagcgataagtctgctaaactaaactaatttaacatacgttaattattgcttgagttgttaatccttctgtattcttttccatttccgtggaatttccggatgagtcttgagaaattccctcaaggtttgccggtttactcccagtttcttgctgatatatactttagtcttatgttctttaatatactgcaagatcatctcttccttaccttttagcttacaggcttccggtcgctctccttttggacggcccagtttggcaccttgcacttttttccgagccaacgcttctttcgttcgttgcgaaatcaggttgcgttcaatttcggcgcttaggctaaatgcgaatgccaagattttactgttaatgttatttccgagttcgtaaccttcctttaccgtaaatacaatgatgtctctttccatacattgatgaaggaagctcataacttgcataagattacgtccgagacgtgacagttccgtcgtgatcaggatgtcgcctttacgtatttgctttaataatttaccaagttggcgatcggcgattacttttgtcccgctgatcgtctcatctacccacctgtcgattctcatgttcctcgattttgtgaatttctcaatctcgaatcgctggttttcagtagtttgtttgtctgtactgactcttacataaccgtataccatatgtcctatatttaattaaacaacaaccaagatactggaaacggattgattgatagtgtgttttagtaaaaacaaacttttttatgggtgtgttaaagaagttgagtgggtttgaactccatacaaattgtaataaaaagggttaatggatatccgtatagaaaatttaagttacttttgctttcgaaaaataagaaggagtcttagaatgatcatgggtatgaaaaagttattgtctttacctccaaatttggttgattgtttccatgcgatagagcatgtaagtacggaggaatggttttgcacctcggatccggtaggtgcccgcttgggatccgggggaggaacgacttggttgttggaggcctcccggcgaaaagaggcccctgatgtatccgtggaggagtggttgggacaggagaagcgtatcttgttgcatgccggagggcaaagccgccgtttgcccggatatgcgccatccgggaaaatattgactccgatccctgtgtttcgctgggcaagagggcagaggttatcccagaacttattgtctttgcaattacctctttatgaacggatcatgaaaaaggcgccggaatcgcttcataccttgatcgctagcggtgacgtatatatccgtgctaaccagcctttgcaggagattcctgaggtagatgtggtttgttacggtttatgggtcgagccttcgttggccaagaatcacggggtttttgtatcgagccgtaagtctccggacactctggacttcatgctacagaagccttcgttggaaactttgggggaattggcgggtagtcatttattcttgatggatatcggtatctggctgctaagcgacaaggcggtgcggttattaatgaaacattcctataccgaagatggcaaggcgatgaaggcgtatgatttatatgctgagttcgggttggccttggggaagaatccacgtatcacggactcggagttaaatcagctttcagtagcgattctgccgcttccgggtggagagttctatcattatggaactagccgtgagttgatttcctctacattggcggtacagaacttagttagggatcaacgtgcgatcatgcagcgtaaggtgaaaccacatcccgccatgtttgtgcagaatgcggtgttacaccagaaattgaccgctgagaattcggaattatggatagagaatagttatatcggtgagaattggacgttacgtggccagcaaattataacgggtgttccggagaataattggaacttatccctgccggaaggtatctgtgtagatgttgtcccggtaggggaaaccaattgggcggcaaggccctatggttttaatgacttgtttaaaggggccttgtctgatgtgtctaccttgtttatggggaaacctatcttgacttgggcgatggagcgaggtatcaccttgggagggaatgaggatatacaaaacgcacctttgttccctgtttgccaaaccgtggatgagctgggaaaagtgctgcgctggatgattacggagctggatagggaagagggaaagcatatttggctttccgcccgaaaattatcggcgaatgatttgtccgatcaagcgaatttacgccgtttagtagctcagcgagaagttttccgtaaaaaagactggtcattattggccgctaatcatgagaaaagtgtattctatcaattggatctttcggatgcagcggaaagcttcgccaaagacaagattgtcttaccgaaagcccttcccgaggataatccgttgatgaaaaggatacataatcatatgttccgttctcaggtgatgaagatctcgggggtagcgtataaggaggaggagcaaaaggctttcgctttgttgcgggaggggctggtcggttccgtcctcggaagtaagcagcagccgtgtttgaatgtctatcgggaccagatcgtatggggacgtagtccggtacgtattgatttggcaggtgggtggacagatacgccgccctattgcttatatgcgggtggaaacgtggtgaacgtggcgatcgagttaaacgggcaaccaccactacaagtctatatcaagccttccgatacccataagattatccttcgctcgatcgatctgggagcgatggaggttatctcttcatgggatgagcttcgtgattataataaggtaggatcgccgttttccatcccgaaagcggctttggccttggcgggatttgtcccggaattctcggcggaggcttatgcttctttggatgtccagctggaagcttttggtagcgggctcgagattaccttgttggcggcgataccggcgggttccggtttaggcactagctcgatcctcgcggctaccgtgctgggcgctatctctgatttttgtggcttggcttgggataagaatgagatcggaaaccgcaccttgattttagaacaattgctgactaccggcgggggatggcaagatcaatacggtggtgtattgcacggtttgaaactcttgcaaacgaacgagggttttaatcagaatcctttggtacgttggctgccggaatatttgtttactgatccggaataccggccttgtcatcttctttattatacgggaattactcgtacggcgaaagatattttgtcggaaatcgtacggggtatgttcttgaatagcgaggtgcatttaggtcttttgtccgagatgaaagcccatgcgctcgatatgtacgaggcgatccaatgcggagacttcgtggcttatggtaaattggtcggaaagacttgggagcaaaataaggcactcgattccggaacgaatccggcggcggtggaagctattatctccaagatacaggcttatgccttgggatataaacttccgggagcaggcggtggtggttacttatatatcgtagcgaaagacccgggtgcggccctgcaaatccgaaagatattaactctttctccacccaattcgaacgcccggttcgtggagatgagcttgtcgaataaggggcttcagattagtcgttcgtaggttcgtgccacgccggtataggtgttggcttacgctggtatagatacaggcctatgcctatactgctgaggggcgttgcgtatatacgtgtgtatttttgcctgttttgttgctaattggaatatattgcatgtgttttggaacatttatataaatgatcctgttgtacttttgcggagtttaatgaggtgtcagatctgatggggaagagaattgtttttatatggcttttattggcgttcgcttgggtagcgaagagccagaactacatgataaaaggaatcgtgactgattccattacgggagaacctttgccttatgtggctgtgattttgaagggaactacgataggtgctacgacagatctggatggggcttttacgctctcctcttcatctaaggtacgtactttacaggtctcttatttgggttatacggagaaagaattgaaattcgttccgggtaaagcggaacatttgaagattcagctagctccgacaagtattaatttgtcggaggtgatcatcaagccgggaaaggaaagatatcggaagaaggataatcctgcggttacctttatcaaaaacgctatcgcacgtcgggagagcaacgatcctcgtaatcatgattattttcggtatgatcaatacgagaagatggtcttcgctatgaacgattaccaaccgaaaccgaaaaaggatggaaaggcgggaaagtttgacttcttgactgagtttatcgatacgttggaggtgggaaagacgatcttgccggtatccgaacgtgagaaaatccagaccgtttattatcgtaaagacccgaagacggaaaagagggtcgttcaggctacgaaagcggctggtgtggatgaggtcttctcacgagacggtatgcaacagttcttgaatgaggtattccgggaagtgaatatcttccagaatgatattcctttgttcttgaaccgtttcgttagccctatgtctacgatgggacctaacttctataaatattatttgctagacacggtggaggtcgccggacagaagtgtgtggatttgggtttcgctccgtttactccggagacgttcggctttacgggacatctttttatcacgttggattctacttatttcgtgcagaaggttaagttgaatgtcccgaagaagatcaacttgaattttgtcggtggaatgacgatcgagcagactttcgaccgtgccccggatgggactcgtatcattacgaaagatgatatcaacgtggacttcaaattgacggagaaatcgaaaggaatgtatgcccgccgtttgaatatctattcgaatcaagcatttgagggacccgatgatcctaaagtattcgaggagagcgcacctattattataccgatggaagcttatcgccgttcggcggatttctgggaggagaatcgtcctactgaggcgggaactcgcaagcagaataacgtggagttgctaatggcgaaacttcgttccgttcctattttctatgtgacggagaaggttgtttcgatccttacctccggttatatcgcgacgaataagattccggagaagagcaagttcgagtttggtccgatgaacacctatatcagtggtaacgcgattgagggggcccgcttccgtgtcggtggaaccacgacaacggcgttcagtaaacgtcttttcttggatggttatttggcttatggatcgaaagaccgcaagttgaaatatgatggtatcgtagaatattcttttatcgataagaaggattatcggaaagaatttcccgtgcattctattcggtttgagtacctatatgatattaaccagttaggtcagcagtatatgtataccaacaaggataatatgttcttagccttgaagcggcagaaggatacacgtgccacctatttaaggaatatggaactgacctattaccgtgaacattataacggctgggcttatggggcggtacttcggaattttaaggaatactcaaccggttacgccgcattcgaccgtatcggtccggatggccagatcacggctaccgattcctaccggatgtcggaagtggagtttaagttccgttttgccccgaatgagaaattctaccagactcgtaattaccgttatccgattacgcttgacgcaccggtattcaccttgaaccatacgatggctttccaagatgtattaggtagttcgtatgattatcagaagacggagatcggtatccagaaacgcttctggttctctgctttcggttatgtggatattctcgctaaagcaggtaaagtttggacaaaagccccttatcctttgttgatcttgccaaacgcaaacttgtcgtatttggtgcaaccggaatcttatacgaatatgaatgcgatggagttcatcaacgatgagtacgcttcgtgggatattacttatttcatgaacggagccttgttgaaccgtatcccgcttatcaagaagttaaaatggagagaggtcttttctttccggggtatgttcggacacttgacggataagaataatccgtatatcagtgagcagaatgaaggcttgttcttattcccgcagggctcttacctgatggacccgtctactccttatatggaggcgggtgtcggtatcgagaatatctttaagttcttgcgtttggattatgtatggcgtctgacctataaggatcatccgggcatccagacaaagggtatacgttttatgatgaagctatccttctagggcaagtattatttccagtcgctgaactcaaaacttaattgttcccaacggtctttcgtatgaggctcctcttttacgggattagatacggataggccgatcagtcggatgggatgctcggtatattccacttctttcagcaattccttggccaagggaaggatcttatctaaggttgttaactcttccggacggctgaggcttctcgtgatttggttgaaatcgtggaacttgacctttaaggtaagtgtgtttcccttgaatccggaacgttccagcctgccgataagttcggtcgctacgtgataaagctcgatgataacagaggatttgcgggagatatctttttctagcgtatgctcgcaacctaccgacttccggattcgtaccgcttctacgggacggttgtctatacctctggcaaactcataataaagtattcccgcctttccgaactggcgggtaagcatctcccccgaacattcccgtaattgcagcccgttgtggataccgagtgtatgcattttccgggctgttacggggcctactccccaaaaggactcaatgggaagacgtgctatgaaatcgagggcttggcttggatggatggtgcataatccattgggcttccgataatccgaggctattttcgctagaaatttgttgtaggagactcccgctgacgctatcaggttcaaattatcccagatccgtttcttgatctccttggcgatatctacagcgagagagatgcctcgtttattatcagtgacatccaaaaaggcttcatccaaggaaagcggttctatgatatccgtataatcatggaagatctcgtggatctggcgtgagacggatttatatacgtccatccttccgtgtacgaatatcaggttcgggcataaacgtttggctttttgagacgccatggcggaacgtaccccatatttccgggcttcgtagctagcggcagctactacgcctctctgctccgcatgcccgaccgctaggggttttcctcgcaattccggattgtctcgttgttccaccgaggcataaaaggcatccatatcgatatgtatgatctttctcaagatagctcttttattactggtatttacgataacccttcgtctgtttatgaagccgataaccgcattataagatctctacggagttaatgacgatattctcggtcggacgatcttgcttgttggtcttggaggactgtatggcgtctacgacatccatgccttccaccacttctccgtaaaccgtgtattgattgtcgaggaacggtacgccacctacattcttgtaagcctcacggagttccgggtttaactttacctcgtctttccgcttctcggcctccagctcggtcttgccgatcaaggtatcacgaaggatcgccagttcttccttgttaccactgcgatagaattccatgatcttaggcttgttctcgttttgcaggcgggcgaatatctcttgtttcagacggccttccagttgcttttccatctggttcaactcttgttccgaatactttttccccgttacgatatagaattgggaggcggaagaggccttttccgggttcacttcgtctccggtacgtgcggcgcaaagggctcctttcttatggaaatatttcgggtaacggaattcggcgggaacggtatagcccagatcgcccgctcccagttgcttgttcattggggcatccttggaagttacgtcacctccttgtatcatgaaatccttgatcacacggtggaacagcaagccgttatattgcccttcttttaccaacttgataaagttatcacgatgtaatggcgtgtcgttatataatttcagctttatatctcctttgttggtgtgcataagcacccttgtctcagttgcttgattttccattttacttatttttctatgagtttcattgacttgatctttatgttcttcgtgggcctgtcttcggcgttcgtctcgacgaactgtatcttatccacgactttcataccctgtataacctctccgaacaccgtatagttgccgtccagatgaggcgttccgccttccagcatataggcttctttttgctccggcgtaaacttgatgcctttctccttggtcatcttatctagctccatctccgtaaagaactttccggttacgatatagaattgagtcgctgatgaggccttctcgggattctcctcatccggggtacgtgcggcacagagcattccccgcttatggaaatatttcggatacacgaactcggcggggatggtgtaatctagatctccgtcgcccagatgtgcgtccaagggagcgtctttcgagttgatatcgcctccttgtatcatgaattgcttgataacccgatggaacaataatccatcgtaacggtgttcttttacgttcttgataaaattatccctgtgcaacggcgtgtcgttgaacagtttcaccttaatcttacccatatccgtatcaatcagcaccaatgtctcagtctcttgcgcatgcagcgggcatagcgaaagcataaataccgaaacaaacaacatcgtaagaatccgtctcatatttatttctattagttttagatggacaaaaataagaataaatatcgatatctatgatcaaaggaataggtctaaacatgatttctttggtaggaaaccgtaatagcgttacaaacatctgtaatatatgcacatcgttttatgttgaatctaggtaattttgtcatagaaatttaaaactctaaattcaatatactatgagagcaagtatcttagctattttaattttaggggggattgtcttaaacataaaggctcagttttcttataatgaaaagggtcaagccatccctcctgcatcacaacctttcgacaaagaggcttttgagtcaaccgggcatacggttatacgctggttggggaacgctggctttctgattaatagccgtggtacgtgtttgatggtcgatccaatgttgaagggatttgatatgcctttgttaataaatatgccgatcgcccctaaagatgttccccatttggatgcggtattgatcactcattgcgacaatgatcattacagtgttcctacttgtacggaaatgtcttctgtatgccgggaatatcattctacattctacatggattctttgatggaaacacagggtttgaactctttcggacatcgtatcggggagacttttaatgttggtccgatttctatcaagttaactccggcttaccatacgtggcaaaatgagtatccgggatatatgcgtgaatttaaggttgaagattattgtggtttcctcatgaaaacaccggatggcttaatttgggcaccgggagattcccgctttcttcctgagttcttggaattacctgccccggacgtgattttttttgatttttcggatgattcatggcatataggattggagggagccataaagatcgcaaatgcttatcctaaagcgcagcttctcctgtctcattggggaacggtggatgctcccgatatgaaaccattcaatgccgaccctaaaatgctagaagagcgtatctgcaatccggaacgtgttcatgtcttagccccgggagaagcttttgaccttgtagctctcagctctagcgagggtgaacaaagtgccgagacattgattttccctgctgacgcaaaggcttcgtcggagtataatacgggggatgtctatgtctccttgttgaaggagtctggtaatacgatgatcgcgcattttatattcaaaccttacagtcgtaatttctggcattaccatccggatgccgaacaaactttgttagtacttgatggagaaggatattatcaagaggaaggaggagagaaacgtgtgatccggaagggtgatgtgatcgtgacacctcctaatgtacgccattggaatggggcgacaccgggtagctctatcgtgtgtatgaccattacggaacatgcgatcgagaatcatgccgtacagctccgggctgtgacggataaggagtatgaccgatgaaattggtatatctatctgtggttttgatacatgtttggatgtaggaacgtagtatttttgccgtgaatggaatattaattagaaaggtcataagttatgagaaagtacaatgagataagccgtcggggatttttgaggtcggcggtattggcaggaacagggatctgtgcttcttccgtattcaatggaatggttgcctgtgagggcgtgaacaggcaaggaccctcggccttggattgtaaaactaatgccgtggtcggtgtaaagcggacattgggaagtggtacggcttccatggttgtatcggctatgggatttggttgtatgggattgaatcatcatcgcggccagcatcccggcaagaagcaagtaatcgctttggtacatgaggccatcgatcgtggtgttactttgttcgacacggcagagagctatggttatcaaacgaatgaacgattagttggcgaagcgttgaaaggttattcggaccgggtatttgtaactactaaatttgggcataagtttgtggatggcgtacaaatcaagacagaggaagatagttctcccaacaatatacgtaaggtgtgcgagaattcgcttcgcaatcttggagtagaaactctcggtatgttttaccagcatcgtgcggacccgaacactccgattgaggtcgtcgctgagaccgtgaacgaattgatcagagaaggcaaggtattgcatttcggactttgcgaggtgaatgccgataccatccgccgtgcccataggatctgccctgttacggctatacagagtgaatatcatttgatgcatcgtgccgtggaggagagcgtattgccgttgtgtgaggaattgggtattggttttgttccttatagtccgataaatcgaggctttttgggaggcttgattaacgagtatactcgatttgatccggaaaacgacaatcgtcaagatttacctcgttttcaaccggaagctatccgtgccaatatgcggatcgtggaagtgctgaatgcttttgggaggacacgggggatcacgcccgcacaagttgccttggcatggttaatgaataagaaaccttggatcgtagctataccggggactacgaagctgtctcatctggaagagaatttacgtgctgcggatatcattttcaccgccggtgagatgagggaattggaggatgcggtttccgctatccctgtagtgggaagccgttataatgcgctacaggaatcaaaagtacagaaatagattaagctatcggaaatatgagacctgtttttatacttggtatcattctcttgcttgttggatgtaaacagcgagatgagcgtgttctgatggtggatgagcaaggcagcttcgctgttggaggtacggtcttggttgattcattagggcatacttttcatggcgaccatgcgtacgtattttatcaaaagccggtcggagcgaggaaatacccattggtattcgcccatggtgtagggcagttttctaagacatgggaaaccacacccgacgggcgtgagggcttccagaatattttcttacgtcgccggtttagtgtctatcttgtcgatcagcctcgtagagggaacgccggtagaggtacggagagcgtgacaatttctccggcgtttgacgaggaggtttggtttaaccgttttcgtgtaggtatctggccggattattttgaaggagtacagtttaagcgggataaggaaaccttggaccaatactttcgtcaaatgacgccgactattggcacgacggattttgaggtctattcggatgcctacgccgctttgttcgacaagataggcccgggcgtatttattacccattcgcaaggcgggcccgttggatggaatacattgcttaagacgagaaacattaaggctatcgcatcatacgaaccgggtggagcggttccttttccggaagggcaattgccggaggaggctaagtttattacgctttccaagaaaatggaaggcattgaagtacctatgtccgtattcatggaatataccaaggtccctatcgtcatttattatggagataatttacccgaaaccgatgagcgtccggagttatatgaatggacacgccgtttgcgcttgatgaagatatgggcaaaaatgctgaatgatcagggtggggatgtcaccgttattcatttaccggaggtaggattacatggcaatacccatttccctatgtcggatttaaataatatagaggttgcggatttgctttctgaatggttacatacaaaagctttggactaggtcttttgggtaatggaaatatatatagtatcgttttcattaggaggtattgatcttttcacagaggtgaaaagatcgtatcacccccgtgaaaaaatcgcttcacagaggtgaaaagatcgcttcacaagggtgatacgataagagtcttaggccacagctgttacttcttgctgagaaatcagccataaggaccttataatcagaataatttgcttggatattcgcctgcgtctaccaaggcttggatcttatccacaacgccttgacgatccgccgcgtaagttacgccgaaccatttggaggttgtatccaatactttcacacgggctgttccttccgtgatcaatttatttaccatcaacgggatgaaatattcactctttaaattacccatattggcttttaggaactccttgaaatattcctcggaatactcgaagtaatcgggagtgaagccccacatattcatggataccggcgtattttcttccaatacgaccttctttccgttctcgtctacaaactggatatctccgtcgatacgttcgatagcggtacgctccacgacgcctgtcagataaccttcctcgttcgtggcgcaaacaccacgtgctacggaaccgctctcgctcaacgtattacctacacggtagcctaccatgcaataatcattcttcttgccatccatctcagacaattgcttgcctaatacggcgaagctgtcacgtccgtagaaatcatcggcgttgattacggcgaaaggctcattgataaccttcttgcccatcaatacggcatggttggttccccacggtttctcacgtccctccgggcaagtgaagccctccggaagatcgttcaagtcttggaatacgacttcaaccgggatatggttctcatatttggagatgattttctcacggaagtctttctcgaaagatttgcggataacgaatacaagtttaccgaacccgccacgaatagcatcgaaaatagaatagtccatgatggtctcgccattgggacctaggccgtccaattgttttaatcctccataacgactacccattccggctgccaatacaaataatgtaggtttcataatgcgtttctttaatgtgttttttaattcttcgggcaaagttaataattatagaaacattgccatgttattgtccgtctttttataaaacttctaatacgacgatcgacatgggaggcaggctgacgcttaactttcccttttccaccttggctcccttgaaaacttccggcttgaccttctccggcgaatcgaatgtgttatagtcgtttatggaggacgctgtcaggatacgcccgttcacgctctttatcgttacgttttgcaggtcgatatggatgttctcgctttgccggggatctacgttcgccaacgagatatggattttaccctgcgagtcccgggatgcggaggcgcttacgaccggcacttcccggttgtctcttactttctccttgtcgcagattaagtccatcggcaaaaaggtagcgtcttgatgaaccttgtacatctcgaacacatggtaagtaggcgtaagcaccatgtccttgcctttcgtgaggatcatggattgcaatacattgacaatctgtgcgatattggccatttttacccgatccgtatatttgtggaagacatgtagggtaagagcggccacgaaagcgtcgcgcatcgtgttttgctggaacagatggccggggatcgtaccgggttccacatcccaccaagtgccccattcgtctaccatgagggctatatttttcttcgggtcgtatttatccatgatagcgatatgctttttaacgacatcctctatctcaaggcattttcctaaggtccagtaataatcctccgtgttgaaatcggtagcggagcctttattgttccaatctcctactgtataataatgtaaagagataccatccatgcgtccgccgatttgtttcatcagcgtctcggtccagttgtaatcataatcgctggcaccgctggcgatcttgaacaagacattgctatcatagttacggcaatacgtagagtaacgacggtaaaggtcggaataatattccggtcgcatactgcccccgcatccccaactctcgttcccaacgccgaaaaacttgactttccatgccttatcccggccatttttccggcgtaggttggccatagggctgtctccttccgaggtcatgtattccacccatttagccatttcctcaaccgtaccgcttcccacgtttccgctgatgtaaggctcacaacctaataactcacatagattcaagaactcatgggttccaaaactattatcctcaatcgtccctccccagttattattcaccattttcgggcgattttccttggggccgattccatccatccaatgatattcgtcggcgaagcaaccgcccggccaacgtaagttcgggatctgtagtttcttcaacgcgtttaagacatccgtacggtatccttgggtattagggatgtcggactctggtcccacccataagccaccgtagatacaactccctagatgttcggcgaattgcccgtaaatatgtttactgatctgttggttaccttgctccggataaatacggatattcgcgtctcgctgagcgaataagggaagggcgataaatgcccaaacgctgattattagtttcttcatgatataaatgatttgttggcaaagatacacttattcttgaatacatgaatccttttatcgtccgaaaaacacgtacgtgttttcggaaaaagtcgtacatgttttaaaagaaacacgtacatgtttttcttttgtgtatttatcgtatctttgtaaggttttaaggcaaaagactaaacaaaatgagaaagagaaaaatgtttccgtttttagcggctgggatagtcgctttagcgagttgtaacactcctcagaaagaggtagtgaagatcgctgctattaatcctgcgaatatggataccacggttgccgcaggcacggatttttatgaatacgcttgtggtggatggataaagaataatccattgaaaccggaatacgctcgtttcggaactttcgaccaattactagagaataaccaagaacagctccgggtattgatcgaggaacttagcgctacgccccatgaggcgggcagtgtcgccgggaagatcggcgctttgtatgcgatgggattggatagcacgaagttgaatgccgatggagtggctcctatcaaagaggaactggccgctatcaatgcgctggcgacgaaatcggatgtctctaagatggtggctacgcttcataaggaaggcatggctccgttcttcgctttgttcgtggacgctgacgagaagaatagtgccatgaatatcgtccagctgtatcaggctggtatcggaatgggcgatcgggattattatttgttggaagatgaaggctccgccaagatgcgtgatgcttacagggcttatataaataaattatttacattggccggctcaagtccggagcaagcggatgcggcggtggatgccgtgatgaaaatagagaaggctatcgccgagatctcttatggccgtgaggatttgcgtgactcccagaagaactataataaattggcttacgaggatttcaagcaaatagaatccccgttggattgggatgtatattttgaatccatgggattagccgggctgaaagagttggatgcgaagcaaatcaacttctataaggatatgagtgaggctttgcggaatacgacggtcgatgagcaaaaatattatttggcgtttaatttattgagcgcggcggctccgtacctaagtgatgattttgtagacgctgattttgagttctatggaaaggtaatgtccggaaagcaggaacaacaacctcgttggaagcgttcgttgaatacggtaaacggtgcgttgggcgaggccgtcggcgagatgtatgtagagaaatacttcccggcttcttccaaggaaaagatgttaacgctggtggggaatttgcagaccgctttgagcgagcggatcaacggcttggaatggatgagcgatacgactaaggcgaaagcgcaagagaaattggctgcctttacggtgaaaattggttatccggacaaatggcgtgattatagtggtttggagatcaaggacgattcttattgggcgaatgttcgccgttctaacatcttcgatatggcctatcaattggcggacgtggataagccggtcgataagtctcgttggcatatgaatccgcagaccgtgaacgcttattacaatccgactacgaatgagatctgtttcccggctgcgatccttcagcctccattctttaatccggatgccgacgatgcggtgaactatggcgctatcggcgtggtaatcggccatgagatgacgcatggattcgatgatcagggacgtaactacgataaggatggtaatttgatcgattggtggactgccgaggatgctgtccgtttcacggagcgtgctgataaattggttgatcaatatgaccagattatcgtaatagatacgcttcatgccaacggacgttttacgttgggtgagaatatcgccgaccacggaggtttgttggtcgctcaccaagcttatttgaatagcttgaagggcaaagagactccggccccgatcgatggcttcacgaatgagcaacgtttcttcttggggtatgcgacgttgtggggacaaaatatccgtcccgaggagatccgtcgtcgtaccaagatcgacccgcattcattgggaaaatggcgtgtgaacgctgccttgcgtaatatcgccccgttctatgccgcttttgacattaaagagggcgatccgatgtttatggctccggttgatcgggtggttatctggtaatccaaatacagagtttatataagtgagggaagtatgtcacgtcaaaaaggcatacttcccttttttcgtttatcccgatttggcggtctgatacacttttcttatttttgtttgattaagaacgttatacatgaaaattttataccatgcgaaactatatatcaatcgccttacttctcttggcatcttctgtttttgcgtatgatcctcccacgatgggatggagctcatggaatacctatcgagtgaatatcagcgacaaactgataatgaaacaagctgatgcgatgtcgcggaatggcttgaaagaggttggatataaatatattaatattgatgacgggtattttgggggacgggatgcgagcggggagttaatcactcatccggtccgttttccgaatggcttgaagcagacggtagatcatatccatgcgttagggtttaaggcgggtatttattccgatgcgggccggaatacttgcggctccttttgggataaggattctttagggatcaatgtcggcttttatgggcacgatcgtcaggatgcggactacttctttaaggaaataggattcgattttattaagatcgacttttgtggcggcgacgccaaacagaatttcgatcaattaggtctggatgagcaagagcgatacacggcgatccataatgcgatactagctaccggccgtaaagatgtgcgtatgaatgtatgtcgttggaattttcccggtacgtgggtgcatgacgttgccttctcatggcgtatctcgcaagatataaatcctagctgggagtccgtgaagaatattatccggcagaatctatatttgtccgcttatgcgagcgaaggaaaatataatgatatggatatgcttgagatcggccgtggaatgagtgaggaagaagataaaactcattttggaatgtggtgtattatgagctcccctttattgatcggctgtgatctgactaccatctctgagaaagctttgcggctattgaaaaacgaggaactgatagcgttaaatcaagacgtactaggcttgcaagcttatgtcgttaagcaaatggatggagtgtatatcttgacaaaggatctggaagaagtgaatgggaatacatgcgctgtcgccgtctataactctacggatgaggaacggactattcatctggattttgccgatttctatttgcggggcgacgtgagtgtacgggacttatttgaaaggagagatcttggaaagtacaaggatcgggatttttccgtaactatacctgcgcatgggacacgtattttccgtctggatggaccggaaaggggagaacggacggtttatgaggcggaatgtgcttggttgcaagactatcaagaaataaaaaatcacaaagcgtttggaacagcgatttatgaggatgacgggaattgctctggaggtgcgaaggttacgggattaggtaatcgtgatagcaattatctggaatggcataatgtatacagtcgtgagggaggtttatacttgatgtccgtggattatcagtgtgcggagaatcgagaattaatttgtcaagttaatggagttgtcgtaaaaaatgtagaggctcatcctgcgcatgaggtcgctagcgagcaaatagagatccgtctgaaacccggtatgaatcgcatacgcttatcgaatggaaactcatggatgcccgatatcgatcgtatggttttacaaaagaagtgattgccggctacgtgcttgagggaattttcattcttctatattcttgaggtgtcattcccgtatgctgcctgaaatatttgttgaaaaaagacaggttgttaaagcctaaagagaaagcgatctcttttacggttaagtctgttgatcttaattgtgccttggcatccatcgtgataatggaggagatgatttccaaaggagtaagtccgatcgctttcttaatagtcgtgcagaaatgaggtaacgacaaatttaattgagcggcgtaaaaagaaacgctgtgctcggtggtataatgctctacgacaagttggataaacttacggtaaatctcattggtgcgcgtacggattccatttgtccaatggctatgatttttatataactcagccgttccttgcatgaatatcgtgagataagcgatgactaggtttttatttaccatagaataagacggggataaggattgcgcacgtatcaataaacggtatccgtcaatatataattgagctacagattcttccagcggcatgatcggatgttccgtgataacgggaagaaagctcatggttgatttaataaaattgatgtttgtcataaactccgaagagaatccggcgaaatagaaacgtgcgtcgtccgatatttcatgaaactggataaaattgctgggcactaaggtcacgaaatcatatttgttaatcgtatacttcgctagattgatagaagcctgcacggaaccttctacacaaaggagaaacaaacctgcctttatcttatgaggcagcttgctgtatttgtttagcgtctcttttgtgatacgatctccgacgataaaatcgttcgtgatatcgaatgtgagcatttccttttccatatctaatcggtaattcgtctcaaatataggaattaataaatacttattattcaagataataaaaatagaacatagaaacgaaagaatggatattgattccctaaaatttaagggcgaactttacaaatgactactaatcgtaggaaagaggaaacaaaaagaatatagtttgtttactagaaaaatattttgattatggaaaaaggaagaattggactaaacgcaggaaaagtgtggcatgcgctaaacgaggtaaatgaaatatctacgcaagagttaagccgtaaattgtctttaagtattgaggacctagccttggctattggctggttggctagagaaaacaatatttatatcacgagaaagaatggtttgttgtatgtcagcaatggcatcaaatccaatatgtactattaaaaggaaacaaaaaaaggctatccatcacggacagccaatctcaattgttaaccttaaatctaataccatgaaaaacacagtgcaaatatagagattttatgttatgtagcataatgaatagtttggaaatctcatttgcttaacttgatttaacaaaatcatgttctaaaacatatcttttgaggcataattcataaacacaagcgttacttttatctattaccacctttacttgacttttaaatcaagtaaaggatggtaatttaagtaatgccttattcggctagtagaatgatatgtttcgttaagtcattaaacttgataaaataggtaccggcggaaacctttacattatcacctccgtcaaatttggcgaattgtccttgtttatcgttccataaactattgctgccaccgaaacttacggcccagtcatgatccgcacgtaatttcaaaccgccatcggacggaatctctattttctcgccgatccagatgtgcttgtcgtaactagcctgttgtaaatctagatcaccaccccaatcattgaagtctccaatcagggagatttgtttgtattcggttgtcgctccggtataaggttcgatgctgtatttgttaccagccaagtctaacgtgatcgtataatagccatcctgcgtgaagccttcgatattaccgctaccgccgtcattgcttaatgctccgtcgctgtcgtaaccccattgaatgccccaatcacccggggtttgaatgatcttgaatgcgctaccggcttttacgaaacctgtgtaagtgaataacatattattgacatcgtcatcagcgaatatacgcatcgatgggtcgttattgttccatccgttgtcgaatatgtcacccacaaaataaacttgggtacgggcgccactatatggagtgatcgccatgtttaccgtgttcgaataaagttcgggaacactgtcgttaataaatgctttaagacggaagtccacattataagctacggtaggattaaccattcccaaattgttcatggcatcattcagctcgaatgtcttgatcaagactttttcgccggaaccggtagttggcagcgactcgaatttctcgaattcagttcctccttcacagacttgtacggtatacgttacacctgccgcaaaaccgtaatccggttgttcacaggtaaaaatatcgatgatactactggcattttccggcattaaagtatatgaactgttattcggagcattgagggtaaaagatatattattaccttctgagtcctttaggtcattgataaccggatctttatcgtccgtgcaggcagaaaaagcacagatgcccgcaaacacgatggataatatattgactttattcataattgttacttattaataggttttacgattaataacccggattttgtttcaagttactgtttgccacgagttgggtcgaaggaatcggtaacaatgagaagtgactggagattgaagtacctcccgctgtctcgcctttccaatcccaagtataattggaggtgaacttattgtagcggatcaaatccgtacggcgttgcgcctcaaaatagaactcacgggccttctcatcaagcacaaaatccaaagtaagatcggttgccgtaatttccgtggctttcgctcttttccgtagctggttaatagcgcttaaagcggcttgtttatcgcctcccgcccgtattgtggcttcggcaaaggtcagattagcctcggctaaacggaacaatgggaaatccatatccgggaactgctgattcggatcgtgaccgatttgtccggatttcgtgatattcttgaatttagttacagaataaccttctgtaaactcggtcggcttattgatctcgaatgtacggtctgtagtccagaaagaggcacgtgtatcagttgttttcgataagtctccgtcagaagcgaactttttcaccaatgccatgcgggcacggttaccaccccatgcttctttagtcccgaaatcaaccagtgcgttcatgtcaccactgataaagctggcgataaagaacaatccggaccaagagcgggtctgtacgccatcataacaaatcggcaggatcatctcgggagaggtgttgttatctgcaaggaaattatctccataattaggagccagagagaaaccggcgtccatgactttctttgagtattcagcggcggcagaccattgaggggtacctgtatatacttctgcgttcagatataagcgagaaagtagcatccatacggcggcttgatcggcacgtccatatacatttgcacggggagccttcatttgtggctcgatttctttcaactctttctctatataggtatagagattcgcccgggtaatccgttcgggaacataggtaccgatacccgtgttctcatcaacgaacgggacattgccatataaatcaatcaaataataataatccaaggcacggataaaacgaacttcagcacgctgtgtaagactttcctcgtcatccttgccctctgtctgtattaagaagttattacactgagcgatttggatgtacagacggttgaacatattcaataccacaccgttcgaggcggtaaacttagcgaagttcaagggatatacatccacgtcgccagaccaagcgcaaatcgcctcgtccgtaggaagctcattcaggttgaatagcatacgcatcaaacccgacgctccctcatccgtgtcggcgatatctccttgtccgtcgggacctttatttcctgtgatggctaatcccgcatagatcttggcgaaattggcgttctgatcgaactctacgtttaggttcggatcgataggcgtaacatcgagatcacctaggcaagaggtgaagtttacgctgaaaaccagcgataaagccggtattatatatttaaagaatttcgtattcatatagatatcctgatttaaaattagaagttaagacttacaccgagtatacctaccaatgggcgaggatatacgttcttatcgataccgaaggtcttatcagctgcgttcgctacctccggatccaatcctttatatttcgtgataacaaaaggattctgtacggttccgtagatacgtccgcccaatacgccgaataatttgttgaaagagtaacccaacgtgatattatcgcagcgtaagaaggatgcgttttgtacataataatcggacaatacgttcatgttctggaaattcgtatcgaaagcggatagcggacggttggatagatagcctttattgttaatactaccttcacttaatgccgcattggatgaggctacattattatatacatagttcccgaggttggaacgaagtgagaaactgaaatcccatgctttccataccaatttagaagtaaagcccatcgttacatcggctgccggtttatggcagaaataacggtcctcgtcattgatcacaccatctccgttgcggtccacgtataatccttcgatcggattaccctgttgatcatatacctgctcgtatacatagaatgagttcgccgggtgattcacaccttgtgcctgtatcatggtcccggtaccaccttctacggttcctgtcaatacgatggatgaggcgtcatcctgtgcggttagcttcgtaatctcgttgttgttccaagcgacattaaagcctaggtcccatttccaatcagaggttgagatcgctttagcgttgatggagaactcaacaccttgatttctcaaagaaccgatattgctgacgatacggttcttgaagtttgttccggccggtacgtcgatcacattgatcaagtccttagtttccctgtaataataatccaaggatgaagtgatacggttatctaagaatccgaagtcgaatccggcgttccaagtagtagtctcctcccatttcaagttcgggttgtaaccgtcgggacgggcgataggaacaaattggtcgccaaattgatagtaggctccgtcttgtcccgcgaaataagtcgccatatacgggtagtctccttgcgagatatcctgttgaccggtaataccataacccaagcgtagttttaaatccgatacaacgtccacgtctttcataaagccctcttccttgatcttccatcctaaagccacggaagggaacaatccccaacggttgtctttagagaagcgggaagtgccatcgttacgtaaggtagcggtgataagatagcgattcatgaatgaataattgacacgtccgaagaaagagatcaaccttaattccgcaacactattacaaatataactttttaagtacctgagcaacaaaaagttgctcaggaatttgccatgtcagatttttcacctatcttagtgttgcaaatcaaaatatgtatcaaacccgacagacatggcaaaggtagcaattaaatccgagaaactcactccttttggaggaatattttcaataatggagcaatttgactccagactctcatctgtaatcgactcaaccctcggtatgagatgcaggctgtatggttatcaatacagcgaaatcatccgttcgcttatgagcgtttatttttgtggcggctcatgcatcgaggatgtcaccactcatctgatgtaccacctttcgcttcatccgacacttcgcacatgcagtgccgacacgattcttagagccataaaggaactgacccaggataacatttcctacacatccgacactggcaagacctacgacttcaacacggcagacaagctgaatacactgctcctcaattgcctattgtccacagggcagctgaaagagggcgaggggtatgacgttgacttcgaccaccagttcatagaggctgagaagtttgatgcgaagcctacatacaagaagttccttggttatcgccctggcgtggcggttattggcaacttgattgtcggcattgagaacagcgacggcaacacaaatgtccgtttccaccagaaggacacgctgaagaggttctttgaaaggtttgaacaaaacaagcttattatcaaccgtttcagagctgattgcggctcgtgttctgaagagatagtggaagagattgctaaacactgcaagaccttctatatccgtgctaaccgatgcagttcgctctacaatgacatctttgccctcagaggttggaagaaagtggaattgggcggcattgagtttgagctggcctccattctcatcgagaaatggaaagggaaggcataccgtcttgtgattcaaagacagaagcggatagacggcgaactcgacctgtgggaaggagaatacacctaccgctgcatccttacaaatgactacgagtcttccgagaaagagattgtcgaattctataacctccgtggagggaaggaacgcatcttcgatgatatgaataacggattcggctggaacaggcttccaaaatcctttatgggagaaaacacggtgtttcttctgcttatggcactcatacgcaacttctataaattcatcatggcgaggcttgacgtgaagaggttcggactcaaagcaacaagccgcatcaagacgtttgtctttaagttcatctctgtgccagccaaatgggtcaggacatcaaggaagtatgtgctgaatatctattcatgcaacaatgcttatgccaatgtgttccagaatgactttggataacaccgacaacttatagtcgtgattttgcgtattgcctcaagtcgcatggtggggtaaggggcatttatatgtctttatggtgacattcgatgcactgtgccccctttttactaacgatgcagattcttttcgcttctgtatcatattaggcgcgtagttgcggatttgaggatcaaataactttctgtcttgaaaatataagaagtcgggttatctccgttcaagttattgtatgcgttctctgtggaacgatggaaatgttgccaagagtaaccagccatgatatcaaaatgatgcttttcattgaaatccttagcgtattgcaaataaaaatccaataggtgattgtatttgtcgattgtctcataacctgttttgccgttatccacgtaacctaatggagattctttcggatagtaaatgtcttgcgtaccggtagccatatccatacctaaattcaagtttgcacgtaattcgggaaggaaatggaatttataatcaacttggatattaccgaccaagtttttagaattagcctcttcttttttctgttgaagcatcgctaccgggttttttgtagcgattgagataaattcaccggcattttcccaagcaaaataacctccgtatttactgttgccgttcatgactggttgagtcgggtcgaatgcgattgccgctccgatagctcccgtatcggcgaaacgattatttgagatcattcccttggcgttgaagttaatatttaaatgatcttcgaagaaactgggagctaggtttacagatccagtataacgttcgaacttagaggttttcaatataccattttggtttgtatatccgacggatacacgataaggcatattattcaagcctccggataccgtgatattatgatcggttcccacggctgtacggaagatctctttctgccaatccgtattttcttttcctaataacttaacggcgcttgattccgccccaaaacgatccgttacgaaattacgatattcgtcagctcccataacatcgattgatttggtcttcgtgctgatagaaacgtttccatcgtacgtaacccgtgggcgggagcctttttcacctttcttagtggtgataagaatcacaccgttagaggcacgcgaaccatagatcgctgtggcggatgcgtcttttaatacggtgaatgttgcgatatcgttcgggttgatcgtactcaacgggttggatacccctttgataccgtcattgtcgatcggaagtccatcgataacgatcagcgggttgttgctggccgataaggaagaaccaccacggatgcggatactggctcccgaacccggagctccaccgtcagtcgtgatatttacaccggcgattttaccgttgatcatatcggttgcggtggtggtcaaaccccggttcatcttatctggcttaatggccgtcacggaaccggtagcgtcatctttcttcaccgtaccataaccgattacgacaatctcgtccaatacttccgtatcttcttgtaatacgacaattaaattactttgtccttggttgataatgtcttgtgatttgtagcctatgtaagaaataccgatcgtacttcctttaggcgccgaaagcataaagttaccgtcgaaatcggtaacagttccattcgtagttcctttttcaaggatactagccccaatgatgggttcacctttcgcatctttcacgttgcctttgatcgtgacgtcttgtgcgaaaacattgcaggagagaaacaatcctatcaagatagataagattactcttgcgtcgcaagaatacattttttgtttcatgcattagacagtttaagattaatactctattatatttattgaattttagccatagtatgtgaatgcaaatgtatgtttatcaaacctctcatgttgttaaaatgtttgtcgatacccctataaatttacgcaaacgttctcgcaaacgtttgcattgtatgacctaaatacatatctttgattttataaaaaagagaaccatgaaaaagcgtcaaatcacgataaaggatatagcgaaagccttgcatatttccccgtcaacagtctctcgttccttggctgatcatccggatatcagccaagaaaccaagaatatagtgaatgcttacgctcgtgaacataaatataagcccaatgccttagccttgagtttacggacaaataatacgaaaacaatcggtgttattttaccgcagatcgtacattatttcttttcttctgttttatccggtatagaggatgaggcggaaaagggagggtatcgtgttattatttgtcaaagtaatgagaattatgagaaagaagtaaaaggtgcgcaagctttattggaagcacgtgtttgcggtgtcttggcttctgtcgctaaaacaacgacgatctacaatcatttccaagaactaatcgatagcgatatacctatggtgttttttgatcgtatatgcacggggatcttgacagaccgggtggtcgttgatgattatgccggggtttgttccgctgttgaatacttgattcgtagcggttgccggcgaatcgcctttttcggatctccttctcatttagcgatctctaataatcgtaggatgggatatgaggatgctttgcgtaaaaatggattaccggtagataaagagttaattaagatttgtgataattataccgaggcgcttcggttgaccccggaattattgtcgttgcccaatcgtccggatgcgttcttcgccgtaaatgatgagactgctataggggtgctgaatgttgtcaaggccaagggattgaggatacccgatgaggtttcgatttgtgggtttacgaataatagcttagcggaagttagtgatcccctgctgacctccgtggatcaacatggttatgagttgggagctatcgctatgcgtttactgatagaacgtttgaatggcgtgcgtgacggggatcgtatcgtgagcaagattatcaagacaaatctggtggtgagacagtctacccgttaaaaaagtagcttccgaaaacgtttgctctacttctttgcatgaatttgaatagggacgacgtcctgtttcggaataattccgtatgtttgtcaccaaacaaataaataccttaaaaaacataattctcatgaaaacaaaaccatttttgagtttttggcaaatttggaatctaactttcggtttcttgggcattcaattcggtttcgcccttcagaacgcaaattcaagtagaatacttcaaacctatggagcggatgtagagcaactatccttattttggttagcggctccgctgacaggtatgatcatacaacctatcattggtcattattccgaccaaacatggtgccgtttaggacgtcggcgtccgttttttctggtaggagctatctttacgacgattgccttgatattgatgccgaatgcgggattgttcttgtcacccggtacagagacggctattttatctcccgtattgattggtgcgggtatgttgatgatcatggatgcttccatcaatgtaacgatggagcctttccgtgccttggtaggggatatgctacccgatgagcagcatacgactggcttctcgatccagactttcttgatcggcatcggtgctgtcgttggttccttgttgccgagtattatgaataaggtgtttggtttatctaatacggcggttgctggtgaggttgccgataatgttaaattcgccttttatgccggtgcggcgattttattagcgagcgtattatggacaatttttaagacaaaggaatattccccagaagagatggctgagtttcggctttccggtggtgaggtcattgaaaaaaggcgggatagcaatggttttatggagatcatgcatgatatctttcatatgcctaaaataatgttacagttaggtttatgccagtttttcgcttggtttgccttgtattccatgtgggtttattctacgcctgctatcgctgaacatgtatatggggcaacagatcctgcttccgccgaatatgcgatggctggcgataaggtaggtgagttattcagtatctataattttgtggcgatgttattcgctttattattgatcccgattgcccgtcatttaggtcggaaaatgactcatgccctctgtttatgcctaggaggggcagggttggtttctctctatttgttgaataacacaggaatgatggtcttttctatgattggcatcggtatagcgtgggcaagtatattggcgatgccttatgctattctttccgatagtcttcccgctgataagatgggtacttatatgggtatatttaatttctttataacgatacctcagatcacgaatggaatcattcatggatggattgtacgtaatgtttatcatgggcatgccgtgttcgctttgttaacgggaggtgttttcttgtttttcgccgccgccgcagttagtcttgtcaaagagaaaaagttcagtagaaaagtgtaaggtatataagtccggtttcctgttgtcaagcgtaaaaacgctatacccaagtcaaacagcaagttattataatgtaggtagaaaaacgtatctcagataatcccgggtcaccccgggacaacaacaggaaaccaatggactaactactaaaaggcttcttcctcttccttttggcgtgatcctatgacgcgaagaactaacatcgctaccgtaatcacaccgagggatcccatggttacgtttttagtaacctcattgtcaaatgttgtagttccgactaataccaatacgataaatgaaaccatcatgattgcatcagccaaatccttatttattctcatgatcttcttatttttttaggattcgataattgttgtattttattattctttttccaagacttcctcttccgatgacgtcccggtactactcagtcctttcattatgccatatagaccaacacatagagtacccataactactactaatttaatatagtcgttagggatgatagaactgcatgcgaatacacaacctgcgattgttagaagaacataaagatatatacgtattttacctgatttattagttgtcataattgtaatttttaattgtttataataatgtaaatgggcaataactccccggaaatattgatttaataaatgcaatattcctaccgataagacatatcaatgacttaccgaaagatacaaatatgaaacaattaaaaactaaataatgagttttcgtagggcaaagacatgctctcccatacgacacagaagtgtggataaatttatgatctgataagtggatatatgttgagatactctatgaagttgatttactcctctcaaacgcatgtcttgaagggatttctccatatttttccatatccgtatttcgatagtgttgtttgccgtttgtgaaatcctgcggggagttaagcagttactgcttttcagctcgttacttaatacttcgaaacgacgttgggcatctgccgtgtttttttctttcataacggcctctttagtcgcagacataacctcatccatactctttgttccttcttcgggagcaaacagcatgaagctaatcaacagacctaatatgaatagaaaattcttcatggcgcaaatatacaagtatttctttagataataacaacagtatatgttatttgttttttatttttgtagttattttaagaataaaacaatagaatggagaataacagatcgagaattcaagcttggttagaggcggcacgtccgaaaacgttgccggcatcatttagtccggtattagttgggtgtgcgctggcttacagggatggagtatttaaattggctccggcgatcctttgtgttttggtggctttacttgcccagatagccagtaattttgccaatgattattttgattttaagaagggggcggataaggaggaccggttaggcccggagcgagcggtggcttccggttggataactcctaaggcaatgctatgggggacttttatcacgttggggctttcttgtctatgtggctgtttcttgttgttctttgccggctgggagctcatcggtgtaggaattgctattgcgatttgtgtcttggcttattcagcagggccatttcctttggcttataacgggctgggggatgtgtgtgtcgtattgttttatgggattattccggtttgttttacgtattatgtacaagcattatcgttttccttattgtcattcttgctttcgttgtcattggggctgttgtccgctaatattttgatcgtgaataattaccgggattatgagcaagataaggcggctcgtaaacggactacgattgtgctattcgggcgtacgttcgggttggtaacttatttgctgaacggtatattggcttttttgatcacgctgcctttattgatggatgcctcaccttggcttgtttgtttattcgcgacttttagcgtgttgtttgccgccacatggctggagatgaaacagtatcaaggccgtgagcttaatagaactttagggcatacggcacggaatgtatttatctatgccgtgttgctttcagttgtattgttatttggttcttaagatgtgccgtgctttgaacaatcgcttggcctcatggagatttttctgtatgtatttggacaggataatcaatgtaaccgctacgataatcagtaagattcctaaagcgaggtgaggggtgaaaggctctccaaagactaaaacacctacgcagacggctgtcacgggttctgttgctcccagtacggaagttagggtggaaccgatatggtgtacggcttgtaccaatgtaatgttagatactacggttggcaagaaggctaataagacgaggttaataaaagagggcaggtctggaatgggttggattcctgttcctgcctgtgcttttatgaaaaataaagaggtactgacgataaatacatagaacgtaagttttcgtcccggcatatcatgtaccctcgatttattgacggtgacgatatagagggcataagcgacggcggaaagtaatacgatgattacgcctagcccgtttaatcgcatctctcctccatcaatggatagacgggctactccacaaatagcgagcccgatcgccaagagcgtaatccatgatgttttttctttgaatacaaacagcatgaatagggttacgaatatcggataggtgaaatgtagagtcgtggcgattcccgccgccataaaattatagccccaaaacaggaacattgccgagcctgtataaaaagcacccaataaaatcaatatcggtaggtttcgcatctctgttctgaaagattccttttttgctagaagcatacccgataaggcgatggccgcgaataagaaacgatagaacaatatcgaatcaaaccgcatacccttctccataagaggcaatgtaaacaaagggattaaaccgaatgtaacagaagtcgctattccataagcgaaaccttttagattattattcatattatactttttgataaaatgaccgcaaacatacaaaaaagtcttgaaataacatggggttaaaatgcccctgctacttttgtggcattatatgctaaatgtataaagagaaggaatcgctctcttactaataatgtaaataagaactttcatcaatgtgaaatatcctctatcgtcggattatggcaagtcatacctccatcagagatgatagtctgtccggaaatgtaacgggttaaattgatgacgtcagctttgctcataccataaagagttccccggaaatctcctgtcaatcctccaatggaggctacgtttacgatgcttccttttccttttacggtcattgaaggtaaggcggcacgtagggtcgctagcatgtccaatgccgcttgctccgccggtaataagtgctgtttgtctatctaaaatttcttttcttgaaaacatccttttcctgtcgcttgtttttatcaaaaatgatacttatgagacatttctttattttatttgcgattgccggcttgcttattaatccttccgctgcagaggcttgcaccggtattaccttaaaaagcaaggacggtacgactattgtagcacgtacgatagaatggggtggaagtaatttgaacagccagtatgtcgtggttccaagaggatacaccgaacgatcgtatactccgaatggggttgatggaatgactttcacggcacgttatggatatgtgggcttggcagtggagcaaaaggaatttatcgccgaaggactcaatgaggttgggttatcggctggattgttttattttccaaagtacggtgaatatgagaaatataatgccgcagttcgggataaaagtatctctgatctgcaattagtgtcttggttgttgggggaatgttcaaatgtagaggaggtgaaagaggctgttaagaaagtgcatgttatcaatatagatccccgtgcgtctaccgttcattggcggtttgccgagccgtcgggacgtcaactggttcttgagattattaagggtgagctacacttctatgagaatacgttaggagttctgactaattctcccagtttcgagtggcatctgacgaacctgaataattatgttaatcttttcccgggtacggcccccaatcaacaattaggaaatatcgagttgtcttcatttggtgcgggaagcggtttccttgggattccgggcgacgtaactccaccgtcacgtttcgttcgtgcggctttttaccaagcttcggccccacaacaagaaaccgcattggaaacggtcttccagtgtttccagatattgaataattttgatattcccgtagggatcgaattcccattagggcaagtaccttgcgatataccgagcgctactcaatggacttcggttacggatatgcgaaaccatgtgatttattaccgtacgatgtacaatagcattattcggaatatagatttacgttccattgatttctccacggttcgttatcgtgcggtatccatggatgggacgaagcgacaagcggttgaaacgatcaaaatagaatagggcagtgagctctttgggggatatctcgtaagtcaataggataggtgataaaactcaatggaataggaaacataactcaatggattacgttccctattctattgggtttcgactgatgatctaaatcttataatagtaatccggccgcaacttcctccgcaactgcgtcaccttttagtacagatactaaagctaggccaaaattgaataccaagcccggtcctctaccggttactacatttccatctacctcgacagcctcgcctgttacggtggcaccaatcaatttcggttcgaacccggggtagcaagtggctttgcgaccttttaacaaacctagaccgcctaataccatcggagctgcgcagatagccgctacgatacgtccttcacggtattgttgtaataagacttctttcaccggttccgaattgttcaagttggatgctccgggcatgcctccgggtaagatcaaggcatcagcatccgaaagatcgatttcggtaaatgtggcgtcagccgtatattccatattgtgagcaccaatcactttacggtcgtcggtgatggagactgttttcgtgtctatacctccgcgacgcaaaatgtctacggttcccgtggcttccatttcctcgaagccattcgctaagaatacgatcgctttcttcataagattcaattatttaaatttgtacacgtaagtaatagtaccactctggttattagcgccgctgatactgttgaacttcgcctttcgagccgcgtccaaagcgcttttacgcatggaggcgttgtcgatattagttccccggcctacctcggcaaatataacgttgcctttcggatctacggttatattgataacaatacgcccctcctcttggatcgtataagcgggacgggggagacctccggcaccaatggaacggccgttcaaattaaatgatccgtaaccgcctacgccttcattcgccccgtgatcagagttaccgaacggacttccttggttaccggttccgctttcagcgtcgccttggctgttaccctcggcgtttcccataccaaaggctccggccaccttgttgctaatggcttgttccttcttgcggcgttcctcggccagacgtttcttctcggcttcttcccggcggatacgttctttctcctcctcttctttccgtttcttctcagcctcttgtttcttgcgtttctcttcctcattcttctttttagcgtcctcaagggctacgctttcctcgatatcttgagtgatgagttcctgcttgggcgtttccacttgcggctccggtacgggaggagggggagtggtcgtttcctgaggcggttcttgcccggtatacttgggctcgaacattccggcggcggcatctacattcccgaaattaacgagtacacccccgtcttcatccggtacctcggttttcaatacggtaaaccaaagtatcagtagaatgacaccgtgaaaagcaacggtaccgattaaactgtatatgtcatccttattcagtctcatatctgttatttctgcggacgggtggcaagcaccatcttgaatttattctcgttcgctatattcagtatctttacaatctctttgtaaggcacggtctcgtcggcatataaggcgacgaacatctccggttccttcgcgtaactatcttgcaagaaaggagtgatctcatcaaatgagacctgtacctctttttgctttccaaatgccacgtagtaattcaagttcgcgtctatcgttaccctcgtaagaggtttcgccgctgtttgcttttgcgcttgcggcaaggtaaccttgatggcgttcgggattactacggtagaggtaaccatgaagaagatcagcaagaggaatatgacgtcggtcatagaggccatgctgaacgcttcgtttacctttgttcttctttttagagccataattttttataattgaaaattgaaaatggagaattgaaaattaaatagaggagagttggctcatcttcaattttcaattctccattatcaattaattagccggttcatttaataaatccatgaattccatcgtacgagcctccatcttgttcacgacgttatctacttgagataccagatagttgtacgcgaacaatgtaatgataccaactaccagaccgccaacggttgttaccaaggcctcatagataccgccggataatagggagacatcaacattggtgcctgcgtttgccatatcgaagaaagcacgtaccataccggttaccgtcccaaggaaaccaagcatgggagctccggcggcggtcgtcgcgatcaaggggaaacctttttccagtttagcgatctccaaatttccgacattctcgatcgctacgagtacatcgttcatcggacggcccaaacgggtaatacctttctcgatcatacgggcggaaggcgtgttggtgctcctgcataaattgagagccgagtccacttttccctcgtgaatatagtctttgatacgattcatgaacgtctcgtcttcttttcccgcacggcgaatgatgatcagacgttgaacaaaaatataaatagccatcagagagagcagtaacaataccaccataatccaacctcccttaaaggcaaggtctatcacattgatttccgcttccgtaggaagggttacaaccgttaaatccggcatttgatctgccgcctgagagcccacggcctgtagtgaaagtaaaatactcatcgtttcgaattatgaattataatttatgatttataactataaactgtcacttgtcaactattcaagcatgccttgtataaagcgatcgtctcttgcaaaccatggtagagcgcatcacaaatcaaggcatggccgatagaaacctcctccagccaagggatattcttgttgaagaaagccagattttctaagttcaaatcgtgtccggcatttacgcctaatcctaagtttttagctaattgcgcggcctcgacaaaaggagcgatcgctttgtcacgatcttccggataataggtcgcataaggttccgtatataattcaatacggtccgtacctgttttcgccgctagctcgatattcgccaagtctgttccgacgaagatggatgtacggattccttgtgaggtaaaggtgtctaccaattcgcttaagtaatcgaaattgtcctttacgttccaacctgagttcgacgtgatggcatccggagcgtccggaaccagtgtgacttgggtcggttttaccttcaataccaagtcgatgaatttatcacaaggatagccttctatgttaaattctgtccggataagaggttttagtccataaacatcgctatagcgtatgtgtcgttcatccggacggggatgaaccgtaattccttgtgccccgaataattcacagtcttgcgccactttcagcacgtttggcatattgccacctctcgcattacgaatagtagcaaccttgttaatgtttacacttaaatttgtcattgtatatcgtatatcttttttctttcattacatttgcacaaaagtatcggcaaatttagcaggatttagggaattaacagaataatgttggtgaaagatttcataacaaaggaaattccggtgttaaaaagttttgacacagcggaatatgcgttggcattaatggaggattttaaactcaagcatcttccgttattgagtgatagcgcataccagtgtttagtgtcggaaaaagacttattggcgctgccggatccttcggctacgatcggtgagccggttttattcgctccggcgatttcggaaaatagacatttacatgaagcgttggcaatgataacccgatatggattgagcctgttgcctgtggtttccgtggacggaacttatttgggggcgattacccgggatcgtttggtggatgctttatccgagctatgtaatgcggaggcggctggaagcgtgatcgtattggaaatgatgccacaggattattcattaacggatatcgcccgtttggtagaggcgaataatgcccatgtccttaatttgctatcccatcaagataaagatacgggccgtctgcttataacccttaagatcgatttggaagatgcctctcccgtgatccgtagtttcgagcgtttcaattatacggtgctttatcattttatggagaaggggatggtggatgatatgttgcggcagcggatgaatgagttattacattatatgaatatgtaaagtaaggagcgtagaatgaaagttggaatatttggaagtgaatatcagatcgagagacagaatctgattaaacgcctgtttgagaagcttcgtgaacaagaggctgatatttatgtggacagccctttttatacattccttaccgatgcttttggttttgagccagtggtgagcgggctattagtgggtgatgagtttgatctggatatagcccttagcgtgggaggagatggtacgttccttcgtacggcggcccgggtaaataaacaggatatccctattttaggcattaataccggacggctgggtttccttgcggatgtcagcagtaatgaggttgaggatacgctggatgagatttttaagaattactataaggtagaggaacgaaccctcttgcgtttatatacggaagaccgtgcgtttcgcggatataattatgccttgaacgagatcgccgtgctgaagcgtgatagttcctcgatgattacgattcatacattcttgaatggggaatatctgacttcttatcaggcggatggtttggtagtggctacacctaccggttccacggcctattcgatgagcgtaaatgggccgattatcgtcccgcaaagtaatagcattgtcttgagtccggtcgctccgcattccttgaacgtgcgtccgttggtgattccggattcagatataataacgcttcgggtagagagccggaataaatattttctgatctctttggatggacgttcggaaatattcccggcaggtatcgaattaaagatgagcaaggccgattatacgacgaaagtcatcaagcgctataaccatactttttatcagacgcttcgggaaaaattaatgtggggggcagatgtgcgaatgaaataatattgtgtgcgtccagtctttgtccaaatagtagcggatagtattgtattttgtaagctattgataaatagattattctgcatgaatgaactgaacgtatcttatgtcttttgtccagtttttctattatggggtaaaaaatagggggtattcgatgtccagctatgtcctctatttgtccagtgcccttttttgatacacgctttttaactctttacttttgtcggcagattaaatctagcttaatggaagtattttcaattattattcctgtctacaatcgtccggaggagatagacgatttattaaacagtcttacccggcagacatatgtacattttgaggttatcgtagtggacgacggttcttctataccttgtgagcccgtagtcaatgcctataatgaccgcttgaggattcgctatttctatatagagaattcaggcccgggcttggctcgcaatcaaggggtacgttatgcggaaggagagatcgtgattgtcttggattcggattgtatcgttccggccagctatctggaacaagtacacgagtccttgatgcgttataaggtggatgcctttggtggtgccgacagggcgcattcttctttttccgctatacagaaagcggtcaattactcgatgacttctttctttacgacaggagggatccgaggaagccggagacatttggatacattctatcctcggagttttaatatgggaatgcggaaagaggtgtatgaagccttgggtggtttctctgatatgcgttatggagaggatatagattttagtatccggatttttgcggcaggctataaatgccgttattttccgggcgcttgggtctatcataagcgaagaacaaatttcgtccagtttttccggcaagtatggcattcggggtacgctaggattatcttgtaccagaagtacccggaatcattgaaatgggtacattgcctgccggccttatttgtggtaggtctgctgggggtatgtatttccgcttttttcgttccaaaggtatgggggctattgttattttatatttcgctgatcttttttgacgctttagtgagaaataagaacggaatcgttgcgttgttatctatcatagcggcttttgtccaattgatcggatatgggacaggctttttggaagcgatttggagagagggaattctaagaaagaagtattaagataataaatactatttatatgaagtttgcgctgcacacatctactgccataagctcggttctaaaggagccggagcatttctatgtagatatttattatctgatcattttaatcatcgtcgcttttaccctgcttctgttatcttttttgcgttatcacctttataagacaaaaaaggagaaagaactgagagaaatagcgagtcttgtggataaaaatgaaatcttgatacaacgttatagtcgtgagatgtcgcacatcaaggagcaattggaagcgaaggagaaatgtttgaaggaataccagcatgcggctcagtggaaagcgcatcgtgacgtggaatccttgatcaaggaaaaggagcgtttggcgaagtgtttgctggaacagttggatacgttcaagaagctgaagatactttctaaatcggaaacgatattgccggattcagattggagaaacttgatcgagatcgtaaatactctttatgatgattttataagtcgtttacgtgtcgcttatccggatttgacagaggatgccattcgtttttgttgcttgatcaaattgcggctaacctcggcggagctgatgtcagtcttgaatgtgacgaaggacgctatctataaacgcaaatttcgtttgaaaaaagaattgatgccagatgatgatcctcgttccctcgacgatttcttgggaagctattagatctgaacgaatagttttcttgttaataactatgttttagggcatgatttcgttaaatcgagttaagcgaatgaattttgcaaataattcagtatgctacataacataaaaccacctatatttgtactgtgtttttcatggtattagatttaaggttaacaattgagattggctgtccgtgacggatagcctttttttgtatagaggcatgaatacacgaatttttgagaacactgcttaagcgcccctttccgagggtaacatccatactttcaaagtaagctaatttcatcggcaaagtaagttaacttgctttggtatttcagctaacttactttgtcaatgaagctaattgtatttttatgatctttttcggttattctttgtctgtttcgattttgtatacaattgatgtgtttttgtatgcttttagtttagttatgcatttaatagtcaattttttattatataattttgtcttgtgtttttttatgatttccttggttagctgttagcaccaattgatatataaggtttgatggctaatagaagagggggtaaggaaagaaaaatatcaaacgaatatacttgggaccttaacggacagaacaaaatataatattattctgttgattgttgttggaggtaagatttcgtattcccttaatttataagagtatatgcaagagaataggtataatacatgtgatcgttttttaggcggattagaaaaagactttattattacggaacagattgaagatagtccattgacttcagaaccttcttttttggattacgggataatagcagtatgtaatagaggtagtgcgatcattcatttgcttgataataagcatgtatggaataagaatgaattgattttcttatttccgagacagttatgctcaatgcggaacgtgagtgaggacttctcggcgaagtttatcatcataccacatgtactacatggggatgtattaagttccttacgtcattttgatccgggatttcattttttcgtgaaggatcatttttactataatatagaggataataatggtattgagcgttttcaatcattttgcaaattgatagagaatgagcttgagcggtatcggggtaatgggcttctgagggagcggattatatgttacttggggattttttacatggatgtttacgactattatgtgaaagtgcgtaagaaaatccctttcaggactagtttgagaaaagagcaattgatctatgatttctgtagtctcgtggcagagaatttcaagaatcacaagaatgtcggattttatgcggataaattgaatataacgacaacttatttaagtgcgatcatgaatgaaaggtgtggcatttcagccaaggagtttttatctatctatatagtgttagaggtaaagtcgttgctacgtgactctcgattaaatatacaggagatcgctatattgactaattttccgtctcaatcgacattgaatcgcttctttcgtcaacggacgggaatgactctttctcaatatcgaaaacatatattttcaacatgattatgtttgattttcatattatttctataactttaaacttctgctgcaatcgttattatcgttcatttgttgtataaataacagaggagattgcttgattgatttaaagtagggaattagtggttataatttaatatgacgatgggacaatgtaataaaatgctagaggaaatgagctttaatgccctattccagaaattacctgttggaattgaagtttatgacgagagggggcagctagtggatctcaataggacggacgagaatttgttcgctataagccggaaggatattatgggaataaatcttttcgagaatcctaattttccagaggacaagatcgctcgtctgaaacagggagaaatggttgtgttcgattgtaattatgaatttgataatatacaaacgaatgagtactataacatagacccaaaaaaggaaggtataaatttacgtctgtctattaaatgtgtgccgttgaaaggagaggctgaagatatctgtggatatgtactaatgtttacggatgagacggaagaatatcaaaagtcggagaaagtagaggaactgttcacgaagttgaaaacggttatgcgttgcagtgattccttgctgtgggaatatgatgttaaaaccgataagatgcatatcgatctggatttacgtgttttaggtaataaatccagattgagagcaagtaacttgacaacgaaaaaagatttttgtgagatcgtatatccggaagatcgggaaagggtacttgtacaaggctttgaaaagattgttatgggtgagatcggtgaatatagtattcaataccgacagctttttgaggggcaatatgtttgggtgagagcgtatgcgtacccttataaatatgatgaggcgggaagacctgcgaaaatcctttattacttgatggacataacggatgagatcgccatgcaagataaattgcgctgggcggaacgagagcgtcaacggaaagaatatgagttagttaaggctaaagaggcgaatcggcttaagtctatgttcttggcgaatatgagtcatgagatccgcacgcctttaaatgctattgttggtttcgcgaatatactggcagagaccaaggagatagaggaggaggaacgagagttttatgtggatatcattgacaagaatagtgaattgcttctgcaattgattgaggatatccttgatttctcaaagattgaggcgggaacctttgacattacgaagagaaatttcgattttaaggagatctgtgaggaaacctatgcggtacatgccttgaagattccgaaaaacgttcgatttgttttcgatcggggctcacaacccgtgactgttttttcagatccgaaacgagtcgtgcaggttatttctaatttcttgacaaatgcgattaagtttacttcggaaggtgagatcaaattagcctataaggtatcgaaagatgaaatacgagtttcggtctcggatacgggaatgggaatctcggaggaagattgtagaactatattcgatcgctttgttaagttgaacgcttgcaaacaaggtaccggattaggattggcgatttgcaaaaatattatcgagaaactagggggacgaatcggggtagaatctacattgggagtaggttccactttttggtttaccttgcctttgaaggagattaaagagaatgaacctaagttctaaggggatatatattgtttacggatatgttttaaagcatagttttgttaaatctggttaagtaaatgagatttgcaaataaaatattatgctacataacataaaacctctatatttgcactgtgtttttcatggtattagatttaaggttaacaattgagattggctgtccgtgacggatggccttttttgtttcaaaaaatcataaccatgagattttaggagtgtagctgaaggttttttcgtaaatttgcgctccgtttgtaatactagatcctgtatttaagtgtatgaaaagagtattctgtccaaaatgtgataatcagttgtcttttgatgagaccaaatatccggaagggaaggtattagccttcgtctgtccgcagtgtggagcgcaatttaagattaaattgggccgaaaggtggtgaagacggctaccggtgaggaaaaagaggtgaaggaaccggatttctcttgtggttatattaccattatcgagaatggttttgcttttaagcaagatctaccattagtgatgggagataatgtgattggtcgccgtaataaggatacggaaggtgtagatgtccctattatcacgagcgatccaagtatggggcgtaagcattgtgtgattaatgtaaagaaagacgctaatggcaagttcgtttatatggtgcgtgactttcctagcttgaccgggacttttgtgaaaaatgtgttggttggtaaaaaagaacaagtacgtatcggggaaggtacgatcgtaacgattggcgctactacttttatcttacattcggcgaacgagggagaagaagaggaataaatataaaaaacttcagaggctgttcccgttaatgatctcgatctttaacttcgggtcggaatgatggcagataagggattttggcgtttgttttgggagtgagttataagatatatgctcattccgggatacagctctgaagtatcactgagaaaacaaggctcataggtattaagattaagccgattaacataaagaaatgaaaagaaccgaaagaatagttgtattaactatggttaaaataggctcttagggtttgtttttctagaaattagctaactttttgtgcggtttttgaaatgttaatgagcacgaggtgaaatagaaatatagatagttatggagcaggtttctaaacaacagccggtaaataaaacagcattccgggtattggtggcgttaagcgttacgcattgtttgaatgattcgttgcaatccgttatctcggcggtttatccacttttcaaggatgatttagcgttgagcttcgcccaaatcgggttgattacgcttgtttatcaattatccgcttctgttttccagcctataaccggtttgatttttgataagcgtcccgtggcttggtcgttacctattggtatgagttttacgttggtcggcttgttgaatctcgctttttcctctacgctccattgggtcttgatctccgtattcttgataggtatcgggtcttcggttttgcatccggaagcgtcccggatcacctcgctagcgtcgggagggcgtaggggattggcgcaatcgctttttcaagtgggtggtaatttgggcggatcgttaggtccgctactggttgctctattggtggcgccttatggacggactcatatcgctttgttttctatactagcattcgtcgctattttggtgatgattcctatctgccgttggtataaggcgtatttgagtcgggtgaaatggcagaagaagtcgggtgagacgcatgtggagatgcctctttctttgggaaaaacagtcttttcgatctcgatattgctgaccttgattttctctaaatatatctatatggctagtttgaatagctactataccttttacttgatccataaattcggggtgagtgtacagacttcgcagatctgtttgttcgtcttcctgatcgctacggccataggaaccttggcgggtggtcctatcggtgataagataggacggaaatatgtgatttggggatcgattctaggggcagccccatttagcttgttgatgccgcatgtgggattcgtttggacgatcgtgcttagtttttgcgtggggttggtcttatcatcggcgttcccggctattttgttgtatgcgcaagagttgcttccttataaattaggtcttatctcgggacttttctttggatttgctttcggtgtggcgggtatagcctcggccgtattaggaaatatggcggatcattatggaatagaggctgtctacaacgtatgtggcttcatgcctcttttaggactggtcacttggttccttcccaacttgaaaaagaagtaaaaacaatcctccctttttcgctgttattactccaactgaacgtcaattactaaatgagtttatggtgagtaatatagtatcttacagtattcttttgctgtatcttcttccatgtgcttcatggagccaagggaacgatgtggatttaagcttggaacaatctctcgacctgcttcataaggaaaataaaagcttgaaaatagcagggaaagaagtggaatgggctcggaatgagcatcaaaagctaaacgctttttggtatccgtcggtgaacgccgcgggtgctttcgtacatatgtcgaatccgatagaggtacggcagtcgctgagtaaatatacggaaccggcgaaggagtttgtccataattatatcccggataatgagctgatcatgtcggtattggataagatcgggcaaggtactttctcgcttccgctgatctcccaaaacatcacttctatagacgctacggtgacgtggcctgttttcacgggaggaaaacgtatctacgcgaacaagatcggaaagacgatggtctctatagcggaggtgaataggaatcaagtggatgccaaccaacaatccttattgatcgaggcttatttcgggcttcgtctgggacaaagtgtggtggacgtaaaaacggaagtgtacaattctttgaaaacccattatgaccaagcccttaaattagagcaaaacgggatgatcaatcgggccgagcgtctgttcgctcaggtaagtatggacgaggcgaaacgagaactggaatcggcccgtaaggatttagcggtcgctcaacaggcgtttaaaagcttgattaatatggaggaggggagtgacgtacgtaccacgactcctttattcattaatgaggcgcttcctccggctcaatacttcaaggatctggttccgatgaataattatatagtcaatcaattgaaattgcagcaggttgtagccgataatcaactaaagatcggccggtccgcttatgtcccgaatatcgctttattcggcaaacagactttgtacgctgatggactggataaatatttgttgcctcgtacgatggtgggagttggttttacgtggaatatttttgatggcttgaaccgggagaaaaccatccggcaggcaaagatcgctagtcagtcgcttcgtttgggtaaggagaaggcgattacggatctggaggtcggtatcgataaattctacagccagctacaaaatgccttggataacgtaaaggctttggatacgacgatcgagatgagccgggaactggtccgggtgcggaagaaatccttccaagagggaatggctacttctacggaggtagtcgatgccgaggttatgctggcgaaggtgaagaccgcttttcttttggcttattatcagtatgatgtagccttgattaatctgctgtctgtctgcggtacgccggagcagttccaccaatacaagatggagggaaagaccgaggagcttttggggaattgaaaattgagaattgaaaattgaaaatttaggagttatggataaaactaagagatatttgagtgtggccttcgtcgcagtcttggcgattgttatagttgtctcgttgatcgggatgatcttgttgaaaaagaagccggtgatcttgcaagggcagatcgaggcaacggaaatacgtatctccggcaagttaccggggcgtatcgatacctttctggtaaaagagggacagaatgtacgccaaggcgataccttggtcgtcatcaatagtccggaggcgttggctaaatatcaacaggtgaacgccatggagaacatagcgaagtatcagcaccagaaagtggatgagggtacacgaaagcaaatcatcgcttccttgcaacaattgtggaataaatccaaatcggatttacaattggcgaagattacctatgatcgggtcaatgccttgtataaagatagcgtggtaacctcacagcgtaaagatgaggtggaggccatgtataaagcggctgaggccgccgaacgtgccgcttatagccaatatcaaatggcggtagacggggcgcagatacaagataaggagagcgcccgctcgttggtgacggcggcgcaaggaaccgtggaggaggtggcggctctcttacaggacgctcggttgacggctccggaatccggacaaatctcagctattttcccgaaacggggagagttggttggggccgggatgccaatcatgaacttagtcgtattagatgacgtgcatgtggtattgaacgtacgtgaggatcgtttgcctttatttaagatgggaggaacgtttgtcgccgatgtaccggcgatcgataagaaggatattgagttcaagatcaattatatcagtccgttgggcagtttcgctacttggaaatctaccaagcagacaggtagctatgacttgcggaccttcgagatacatgccttaccggtggagaaggtggagggattgcgtcccggtatgtccgtactctatcaactcccttgatactatccggttgtagagacggggcacgccccgtctctacaactaaataatttattgtcgctatgctaaagaagagtcctttctatatggttttacgtcgggaactggatcgcatggtttcccggaggttatacttcggggtgtgtatcgtgctgcctctgttctgtatattcttcatgtctacgattttcggaagcgggcagatggagaacataccgatagcggtagtggaccaagacaacacctccatgtcccgggagatcatccggcaggtagaggtggtaccgactttccgggtaacccggcattatacggaccaagagaccgctcgccatgctacccaagcaaaagaaatctacggttatctagtgatccccaatcagtttgaggcggatgccacggcggggcgtgacgctactttatcgtattattaccactatgccttgttgagcgtgggcggtgaggtacgtggggccttcgagaccctgctgcgtacgctttccctcgccccggtggttgtgcaagctacggcgatggggctgggggagaatcagataaccaccttcctattaccggtacgatccagtagccacccgctgttcaacccggatctggattattccgtttatctgagcaatccttttttctttgtctttttccaagtgatcattttgctggttacggtgtacgctatcggtagcgagatcaagttccggacaggcgatgagtggctggaggcggcacggatgaacatgttcgtggcggtggtgggcaaactgctcccttatacgattatcttttgtatcatgagcgtcttcgctaactatatcatgttcggggtcatgcatattcctttcgcttgcggtttctggccattgaacttgacggcgatcttattcgtggtcgctacgcaagcgttggcggtattcctgttctcgttgtttcccgctatagcgatcgtgattagcgtggtgtcgatggtcggttcgctgggggctactttatgcggcgttactttcccggtcgattccatgtacgctcccgtacattacgcctcgtacctatttccggtacggcatttcgtggagatcaaccagaacttattgtatggcgattacggattcccttatacatgggtaaacgtaagttcgttgtttgcgtttatgttattggcattggtgctgttgccacatttgaaaaccgctattttaagtcataaatatgagaacatccgataatatgaaaggaaccttggcggatatcgcttccttggtcaaggacgagtttaagacgatctccacgagctacgctatcttgctcgtcttggtaggaggtatatttctctatggcctgctgtataattatatgtatgccccggatctggtgcgtaacgccccggtggtagtcgtcgatgactcaaagaccgacttgagccgggagtacatccgtttactgaacgccactccgcaagtctcggtaatcgccgatggtttggattacgccgaggcgcaggagtggatgaaggagggggatgccgtaggtatcttgtatcttccctctgatttcgagacccgggtggcacgagggaatgagtccctgtttatcatgtaccagacgacaagcgctttcctatattatatggcgatgcaggaggcttccagcggtgccatgttggcgttgaacgatcggtatcgtccggagatgttggtgttcttgccccagcaagacgcttccaagatcgtttcggcgcaacccatatcagtggtcgggacggcgttgtataattttacggaaggatatggaacctatttgatcccggcggtattgatcgtcattatgttccagaccttgttgatggtgatcggtatgataagcggggaagagcgggattcgggtaccatcgttcgtttcgcctccgagggattatcctttggccggatcgctagggtgataatcagcaagacctttgtgtattgcgtattgtatacgattttcgctttgttcttgttgggcttgataccgctattgtttggcctgccggatatcggtaattatctgaacaccttgatcctgctgatacccttcctgttggctaccagcttctttgggctggccgcctcttatttctttacggactcggaggctccgttattgatgatcgctttcttctcggtaggcttgatcttcctttccggagtctcttatcccttggaattgatgccttggtattggcaaatggcccattatatcattccggcggctcccgctacgctggcctatgtacagctcaactcgatgggagcgtcgattgagcaagtcggtgtggagtacgtgacgttgtgggtacaatgtgtcgtttatttcctcttggcttgctgggtgtaccggcggaatatcttaaaggcgagccgtgccttgtcgtcattgtagctcccgtatcctcacgtcgatgccgctacctttcaaggcatctttcaactcgccgatcttcgtatccccgtaatggtaagggtataagattttaggcaagaacatctgggccgctttcgccgcttgcgagacggtcatggtataaggctggttgacgggaaggaaagcgatgtcgatgtctttcaggtctttcatctccgggatgtcttccgtatcgccggctatatagactcttagtccgtcgaacgtgaggatatagccattatcccggtggcgggggtgatatttatcccgtccgggtgtggtgttataggcagggacggcctctatcttcatatagttgatggaggtatccgtatcgccgttttttaggaccttcccttttcccagcttcttttggctgttctcgttggtgatgatttccgtactgtttttctcgacagcttgtatcgctttcgggtccagatgatcgccatgctcgtgggtgatcaagatgatatcggctttcgggaaagtcgtataatcggcgtattcggagacaggatctacctgtatcgaatgattgtcgtacgtaagcatcaggctgccatgcttgatgaacgtgatggtcagttcttttccgctcttggtcttgaaagaatccgaggcgaagttactagcggaggctaagctcgccatgaataaactacacataagcatacatgtttttagtctcataatcttgcggttttttagtgtttccgcaaatataatcataatagattaattccctaatttgttcggctatccggtataaatatttacatttgcgacgtatattctgataacatgaaaacgaaatgagaagaattgttctgttgattacgatttgttgccaagtattttgggtggcggcgcaaaagaaagcgcccaaatggatggataagcaacgaaaggcggtggttaccgtcaccacttatggaaaagataaccagaagaaagcgtccggtacgggatttttcataaccgagaccggtgaggcgttgtccggctattccttgtttaaggatgcggcgagggcgaccgtgaccgacgctgacggaaaagaatatccggtaagccgcatcttgggggctgatgaattatatgacgtgatcaagttcaaggtagaggtgccgaagaaagccgtgttcttgccgatcgcccgtgagccgatctcgcgaggagttaccgcttatctgatgccttactcgaccggtaagatcacgaagttcggggaaggaccggtctcggaggtcagtaagttgaaggagccgttcagctattataaattgtcgatggcgctggagagcgggcaggtaaacgctcctgtattgacggcggacggcgaggtgttcggcttggcgcaggaagacgcgtcggggaagaaggaagattcctacgcggtctcggcgggatacgcgaatagcttgacgattcagtcggcggacgcctttaattccacctatagccggattggtatccggaaggcgtggccgtcggacgcaagccaagcgcaggtctccttatacttgatggcaagctcgcaagacccaaagacgtatctggctaccttgaatgatttcatcgccactttcccggattctcccgacgggtatttgaaccgtgccaatcattacgcttaccaccgtgcggatctggctcctacggaggccgagcagggggcttatctggataaggcgttggaagatataaacacggcttcccgcttcagcgagcggaaaggggatatctggttcaaccgagccaagctgatctacggcgtggccgtcgcggatacgaccttgaataaggagcagtggaccgtcgatgccgctaccgaggcgatacaaaaggcgatcggggaggaggacttgccggtctatcgccaattggaaggggacatccatttttataaaggagatttcgagcaggcgttcgctgattatatgaaggtgaacgatagcaatatggcatcttctacctcttggtattgggcggcgaaggcgaaggcgaatatccggggcgctaacttcggggatatcatcgccttgctggatagcgccatcgccaaatgcgggaacccgccaacgaacgaggccgctccctatatcttggaacgggtggatctccgcttgaaactgatgcaatacaaggaggccgtggacgattatgatttatactacgatctcttgaaaggacaggttggcgaccgcttcttctattaccgcgagcaagcgaagttccgcatgagcgatttccccggagccttggccgatatccaatccgcgatccgcttgaatccgggcgacccgacttatccggcggaggaagcgtccgtatatattcgtatggaaaactatgatcaggcgttgaagagcttggagaatgccttgcggatcgctccggatttcgcctcttgctaccgtctgcgaggcatctgctacgtccgtcagggtaagaaggcggaagcgtgcgaggctttcaacaaggcgaaggagttgggtgatcctgtcgtggacaaattaataaaggaacattgtaagtaaagatgcacccgggcgggtacgtacgtgtatctgcccggctacaggaatgtatctgcccggatgtaaggcaccgcttatctccctatgaacttcttgaacgcctctaccttgtcgttcaatatcaattcctccggaaatcgtgtctcttgcaataactcgtagatatgatcgtaccgggctatatcgaaagatatatgcgcatcgctacctaaaatcacaggaacctcgtatttcttgcataggcgcaagatcgtgaggttattatctctggcggtgagtttcttgcggaccgggttgagagagctgttgttgatctccagcaacgtgtgatgctctttggacgctaatacgataggttcgaaatccacctcggccgtaccgtctcccgggtgactgatgatgtggacatgcgggttgcggatcgccccgatcatcgcctccgtattctgctcgaccgttcccggtttgtagcaaagcgagtggatgcctgctatccggatatccagcatcgggaagtactcctcgcccatatcgatcgtacccttatagtcgatgatgttcaattccgctccgagcaataactcgacaccgtatatccggcggggaaccacatgtaggttgcggaagtaaatcggggagcatgtccccggtatgccgggggcatgctctgttatacctagtaacttcaatcctttctcggaggcggccactgccatttcttgcagggtgctaaaggcatgcccactggctaccgtatgggtatgcacgtcaagtaacgtcttcataaattcgtctttaacctacccgcgaaggtagttattatttggtggatacccaattcccggataaaataagcgtcgtgcgagatcagcaagatcgtgcccctgtacgcacggaccatggaggtgataatctcgatgctttggatgtcgagattattggtcggctcatctaggataaacaggtccggagtctggttgctgatcatcaggcagcagaaagccaacctcattttctcgcctccgctcagcttcccacagctcttctcccacgtgtcgtgcgggaagaggaaacggtttagcaaggtcttgatctcgtgctcttggaaatgacgctcgttgaaggcttgcgcttgctcgtacaccgtccggtcgttccggacgatcgagtactcttggtcgatatagatagaggagaaatccgcacggatcaaggaaccgctacgaggcggtaactggccggtaatcaacttcagcaaagtcgtcttgccggaaccgttatcgccttgtatcagccaccgttccccactcttgatctggaagctcatcggggagggccatagatcgccggcctcggcgtaaccgaaattgatctccttggcggtaaccaatatcttgccttcgtgtaagccggatgcgctgaaatccagtttcatgccttgaaggtcgggtagggaggagcgcatttgctttagctcgttggcaaggttctccatcttgtcctcgtgaacctcttttagtttggaggcgcttttctcggcgttctccttcaatccgcccatcatgatccgggggattcctttccggacgctttgcttctctccccgggattcatgcttttgttttcgctcggctacctcacgggcggttttcctgaccctgcgaagctctttctccttcgcttccagtttctcttgcatggaagcctgttcctgttctttttgttccttgtagaaatcataattacccccgtaaagggtgatccccccgacggataattccgctatggaagctaataggttcaataaggtacgatcgtggctgacgaccaacaaggtgatacggcaagacgtgatgaaatcgtataacttctcccggctacgcctatccagatggttggtcggctcatccaatagtaggatcgagggttggtggatctcgattccggagaggaaaaccttggttttctcgccgccacttaatgtgcgcatcggttgggagaggaggatatgctccaaaccccaagcgtgcagggcggcgaggctccgttcctcgatcgtccagtcatccgccagcgtattgaaattagagagggaggcgtcgccctcggtaatcgcccgcaaggcttctagtttcccgtcgatacgtagggcctgggccaccgtcaggttatcatattgcccgaaatgctggggtacgtaatagggtggggtcggatagataatctccccttcctgcgcttgcaaggttccagccaagatacggaggaaggtggattttcccgatccgttgttcccgactaaggctaccttttgccccttgttgatcgtcaagtcgatccccttgaataagacttgattgtccggatgtatatacgtgattttttgcgctacgatactcatagtgtgaactgatttaaaatgtgagatactaaaatggataagaaataccgatgatgatcggtttcactatagcctcgaatctgtcgtcacgaaatcagccctatacggatagagggctttccggatggaaagaacgacatcttgagataaattaagcggctattctcattggagtaattatatagttatatagggacgcaaagttaggaatagttttgggtttaggcaaatgagtatatactttcatgtacaaaagggtatgcttttgcccttgaaagtatatacttatggggataaagcctagaatttctttgtttgcttaaggatatagaacttggctaagtcgcccgtgatgggttgcttctgctggtccagcattttcagttggccttcctctaccttataatacgtgatatctcccccttcttgtttcgttgtcaagacgttaccgtccagcgtgtaagttcctttatcattaaaaataccgtctttctcgtcaatatattcggagcggagggtaaaggttttatccttgttcaatgtcaaggtcgttttaatacccggcgagctggcggccggtaatgtcccttcgtaaacaccccagtaatccaaggaagtctctgcgttgtgcatatccggtacttgggcggtttcctgcttgttcttgtctgtttgcgtggcgtctgcctttgggttgccgctacagctgaatagggctgcggctaccgctactactaatacatattttttcatgtcattcaattgaattataagttctcgttatttaaaaccagtttgtaggttgttttgttgcgtaccgatattcaaataataaggatcgtgtctgggttccatctggcgaaaaagcattatctttgtgttgtaaaacatagataacatttttattcgtaagattatgtcattaccaaacgatccgatgatgctattcagcttcatcaatatgaaacttcgtgacaattattcttccctcgacgatttatgcgaggatttgcaagtgaacaagaaatcccttcttacaaagcttaaagacgctggttttgaatacagcccggagcataataagttctggtgatcgggagtgatcctagcccggtaaacctatgagattcgaaccataagtcaatgacttacgtatcgtaatccattgacttacgatgcgtaatccaatggatcgcataccccggtcgacaaggttgtctccatcaagtctcactcgatatagttcttgacgatctctttccggtccgtgtacttcggatacttaaaagccggtatgccgagcgccatgatcgcttgtatcttgccgtcgatccctagcgtcttggcgagcgtatcttttccttcctgccggatggcggtgagcacaaagcccatatagatctggcttaccccaagcgattgcgccatcaaggaggcgttttgataagcgaggttagcgtcctcacttccgaatcggttggacttcggtgtatggatcagtagcagggcggtggctttccggagaatcggatctttacccgccttgtgttcctctttcaaccgattgaataccggtacgtatttatagacatccttcataaacggcttgaccacacatttcacgacgggattcaataatagcttcgccaaggagtcgaacacgcctatcgtataatcgctcacctgccgtagctttcgcggatcggtgacgacggtgaacgagagactttgggagtttgtagccgtcggcgcagaatgagcggcctccacgatcttgtccagcatctccttgggtacgggcctcgaggtcaatgtccggttggaacggcgtgacttgatcagcaacatcacctgctccggcgtaggcatctggctgtaatcgatcgtatgcgttttctccggcgggaattcgctgtgcgacacggagcccgtcggacatacgtccacgcaatgcccgcaaacgatgcagctttccacacgtaccagcccgatcgtctctccggccctttcttgcgtgaatatatccgaagggcatacccgtacgcatttcccgcatttgatacaactctcttggtctatgtttagtgtcatccttttcctccttttgataagtaaaataaaaactcctgcaaccatcaagattacaggagtctatatataaacaattattttattgtttagttgattacttcttcatagcttcctcgatagcaacggctacagcaaccgtagcacctaccatcgggttgttacccatacccaagaagcccatcatctcaacgtgagcaggtacggaagaagaaccagcgaactgagcgtcaccatgcatacggcccattgtgtcggtcataccataagaagcaggaccagcggccatgttgtccgggtgcaaagtacggcccgtaccaccaccagaagcaacagagaaatacgggtgaccgttctccatacattctttcttataagtaccggctaccgggtgttggaaacgagtcgggttcgtagagttacccgtgatggatacgtctacaccttccttacgcatgatagctacaccctcacgaacgtcgtcagcgccgtagcacttaactttcgcacgaagaccgttagagtaagctttctcctcgataacgttcacctcacctgtcatgtagtcgaactgagtctgcacatacgtgaaaccgttgatacgagagatgatcttagcggcatccttacctaaaccgttcaagataacacgcaaaggctctttacgaaccttgtttgccatctcggcgatcttgatagcgccctcagctgcggcgaaagactcgtgtccagccaagaaagcgaaacacttcgtctcctcacgaagcaaacgagcggccaagttaccgtggccgatacccaccttacggtcatccgcaacagaaccagcgatacagaatgcctgcaaaccgataccgatagcctcggcagcctcggcagcgttcgtacaacctttcttgatagcgatagcggcacctactacgtaagcccagcaagcgttctcgaaacagatcggttgagtttccttacacattgtataagggtcgatacccttagcatcgcagatagcctttgcgtcttcgataccgttgataccatattcgtttaataccgcgttgatatgatcaatacgacggtcataactttcaaataaagccatattatttttttactttttaaaattcttatttactaggaataaagatatcagaaagttgaaaaccaatacaccgccacaacaagccacgtaaaacgccaaccacggtttctccggcttcatcacgaaatacgtgataagcgtagccacagccgtgataacactcagcccgatgaggacacgtgtaaatgttttcttattcattacgaggatcgatatattttacagcttctttgaaacgaccgtaagagcctttcgccttttccagtgcctcgttagcgtccatacccttcttaaccatatccatgaatttacccaagtggatgaattcataaccgattacttcgtcatcagcgtctaatgccatgcgcgtgcaatatccctcggccatctccaagtagcggggacctttagccaatgtaccgaacatcgtacccacttggctacgcaaacctttaccaaggtcttccaagccagcgcctacaggcagacctccctctgagaaagcggactgtgtacgaccgtagacgatctgcaagaacaactcgcgcatagcggtgttgatagcgtcacaaacaaggtctgtgttcaatgcttccaaaagagttttacccggaaggatctcagaagccatagccgctgagtgagtcataccggaacaaccgattgtctctacaagagcctcttggatgattccttctttaacgtttaatgtcagcttacatccaccttgtttcggcgcgcaccaaccgataccgtgagtcaaaccagagatatcagtgatctgagttgctctaacccactttccttcttcaggaatcggagcgcactggtggttagctcccttctttacaacacacatgtgttgaacttcatgtgaataaatcataatcgctaatttattatattaaagtgtaataaaaccttatgctaattttatagtaatatcgctttctctaaagatcgcacaaagatagattttttaatccagccatgcaagaggcgggatttgttatttgtcgttagggtatggttttaacggttccccatttaacaggatctcgtacgtgataggggcgatctttttcatcataaggcctactccgcaatatttttcttgcgacaagcggatcgccttgtctattttggctgcgtcttccttgttcccttggatatggtaggtcatgtggaatgcggtgtataccatggggatggtgtcggagctctcggccttcacgtcaatggatactttctcgaaacgtaccctcatcttgttgaacaaagggattacgtccatggcgctgcatccggctaaggctacgagcattagggctttgggacgggggccctcgtcgttgcccccgttctccatatccctgtctattgtcaccttatgcccgtctagcaaggtctcgaatgtcaagtccttttcccagtttagagtgatttgagcggacatgttattcttgtttattttagtatttcttgaagtttagcgtcgatctcctcgccatgtaggttcttggcgatgatcgttccgtccttatccaccaatacggtgtgagggatgctgtttaccccgtatagttgagcaccggagtttttccagccttgcaagtcggagagttgggtccatgtgatattcaggtcctttacgcctttcgcccatgcgtcagccttgctatccaaggagataccaacgatctcgaaacctttgttcttgtatttcttgtaagcggctaccaaattcggcatatcccggcggcaaggaggacaccagcttgcccaaaaatcgatcaacacgatgttcttgccattgcctacgaactcggatagcttgtgcgtcttaccgttcgggtcggccatctcgaagtccacgaacttcttgcctacggctacggttttcagtacatctaggtgagccatgagcttatcgatgttcggaacggccttgaaagcggagtccgccttggcgataatttcgttctgggcagcctcgtccaagctataacggaaatcgtataataacttggcggcggattgcttggtcgtattattcaatatgtaagtcttgacggcatcggttaccttttggtcgatctcgtcatatttcttctcggcggcgcttacgacttccttgtcctcagatttcatgtcggcggaaagcttctccaaatccgcacgcaaagtcttcatttgtgcttgcagggctttcaatccgtcattctccggtgttccagaaacggcggaagcggcctcgtcaagaacagcctgtaatttaccgttctccagtacgaatacgcttgtaaaaggagcgttctcgccggaagcggcacgtttgggttccacgacatcctcggcgaaggcgagtttgcgtagggcaggggcgttctgtgttcccttgaacgtgaacgtgccgttctgcaccaatgcgctatccattggggcggcgtcttgtacgccatattcatacaggtaaacgtattttccgtttagatcggtgttcgctacggtaccgttgatctcgtaacccggtttttcgctgcatgcggctaggagcagagctgatgcggcaagagtaagatactttttcattttgtatttgtgttatgtaagtaatgtattaaaatatggaatattgacttcgcgaatatacgaagtcttttgggaaaaaacgttgcccgatgacatttacataaggctttgctccgaaaaaagaaatattctcgcttatcttatctgtagaagagtgaatttttaagtatagtgttgtttttcaatttattgcagttttgttgttttttatgcttaggaaactttagtttcttctagggaaaacaaaagttttcctatgaataaacaagagtttctcccgtataaaactcttgtttctatcggaagaaacagatgtttcttttagaaggtcggctatgtctccaatgaaaatctgtccgagttattgaaataagtggagttttatgtacttttgaggactaaacaacggacgattgagacaatgacatttaaagaagtacttcaaagattccgtaccggatcttttaccgaaagagaaaagggagcgaagtttgagaaactgatgaagagatggttccaaacggaccctcgctatgcggataaattgcaggaggtttggctttgggaggaatttccgggaaaaaaggatttcggcgggaaagatcttggtatagacttggtggcgaaaactgatttgggtgattattgggccatccagtgtaaatgctatgacgagaaggccgtcataagcaaggcggtcgtagactcctttatatccaccgctcatcgtgcgtttatagatgatttaaccttgaagaccacgtatttcagtaacctgatctgggtttctaccaccttgcgctggggagcgaatgcggaagagacgttgaaaggtcaagacatttcggtgactcgtatcaatatgcatgagttggaggcttctccggttgattgggataaactcttgaaaggggatacgggaaaagcggctttacgggaaggtaaacagcctcgcaagcatcagttggaagcgatgaaagcggctcatgaatattttagggtacatgaccggggaaaactaatcatggcttgtggaacgggaaaaacgtacacctccttggagatcatagagcaagagaccgggggcaagggactgattttattcatggtccccagtatcgctcttttaggacaatcgctgaatgcttggatgacagatacgaaatacaggatgaaggctgtttgtatttgctcggattccaaggcttccaaaaggaacgatttcgataatgacgagacgagtatcatcgataacccattgcccgccacgacaaatatcaactcgataaaacggcaattattaggctataaggatacggacggactggttgtcgtattctcgacctatcaaagtatagatgtcttggccgaggcgcagcgagcgctattggaggctgatccgtcttatggtatattcgattatatcgtttgcgacgaggcgcatcggacaaccggttttaagcaaaaaggtcgtgatgagagtcattttactaaaatacatgacaatgacttgatccgggggaaaaagcgtctttacatgacggctaccccacgttattataatgacaatgccaaggcgacggctaaagacaaggatttagtgttgtggagcatgaataacccggactattatggcgaggagtttttccggatcggattcggacgtgccgtgcgtgagggactgctgacggactataaggtattggtgctgacgattagcgaggatgatatcccggattctatcctagaggatgtcaaggataagcaacaaaaggaaataaagatggacgacgccagtaagctcatcggttgtatcaatggcttgtccaaacgtataaaaggagataagggggttacgaaggaggcggacccggtattgatgcggagggccgtggcgttttgctcgaccattaatccgagtgagcgggggagcggtatctcttccaaggggtttgctgccgtgatgcctacgatggtgagaaaatataaggaatccttgtcggaggaagtacgggaagaggtcgtggatatcgaggttcaacatatcgacggggcgatgaatgccgctacacgggaggagaagatcgcttggctgaaggaggagaccggcaatccgaacgagtgccgtattctatcgaacgtgcgttgcttgtccgaaggggtggatgtgccggctttggacgctgttctttttgtcgccgcccgtaatagcgaggtggatgtcgtgcagagcgtggggcgtgtgatgcgtacgttccacaagggggcttcggatgagaagaaatatggttatatcattgtcccggtagtcgttccggcggatgtggagccggagaaggcgatggaggataacgagcgtttttccgtggtctggaaaatcttgaatgccttgcgtgcccacgacgatgagtttaacgctacggtcaataagatacatttgaataaggtgaagcctcccaaggtggttgtcgccgggataccgcaaggctcgggtcggatgcacgggaaggattggatgcccgatccgcaggatcaacagacgggggcgaccgagctaagtaatgaggaaatcgctcgccagttggaacttcgtttcggttctttgcaagatgggatctatgcgaagatggtcgagaaggtcggagatcgcctgtattgggagaactgggcgagggagatcggcttgatcgcccagaaatttatagagcgcatcgcccgtgtcgtgaaagagggattgcacaaagaggctttcgttgaattcttgaatggcttgcaaaagaacttgaacccttccattgacgagggacaagcggtggagatgctggcgcagcatatgattacacgtccggtattcgatgccttgtttaaggactatcagtttgtcaagaataatgcggtcagccgtagtatgcaacgtatgttggagctactggagagcgaggccatggaaaaggatacggaggtattgaataaattctatgagaacgtgcgcatgaacgtaggcgatattgacaatctggaaggaaagcagacgcttatcaagaatctgtatgagaagttcttcaagggtgctttcccgaagaccgtggataagctgggtattgtttatacacccgtggaatgcgtggattttattatccattccgttgacgatatcttgcgcaaggaatttgattgcagcctttcggatgagaatgtgcatatcttagatcctttcacggggacaggtactttcattacccgtttgctacaaagcggtttgatccgtccggaggatctggaacgtaaatataagaatgagattcattgcaatgagttggtcttgcttgcttattatatcgctgatgtcaatatcgagagcgtctttcatagtctcgtaaagcgagatacttatttgccgttcgagggcatttgcttaacggacactttccagacaaccgagaacgaggagaatgttttggatcagacttggtttcccgagaatgcggcgaatgtggataagcaaaagaaagctccggtacgggttataatgggtaatcctccgtactcggtcggacagaaatcggcgaatgataatgcgcagaatttgagttacgctcatttggataaacggattgccgagacgtatgccaaagccgctcaagcgactaataagaactctctttatgatagttatattaaggcgtttcgttgggcgagtgatcgcattgcggattgcaaggatgggggtgtggtagctttcattagtaatggggcttggattgatggaaatgctcaagaaggatttaggaaatgtcttgaggatgaatattcgagtgtatatgtgtttaatttaaggggaaaccaacgtacgagtggtgagttgtctcgtaaagaaggcggtaaaatatttggttcaggttctcgtacgcctatatcaatcaccttcttaataaagaacccgaaaaagaaagggaaagcgacgattctgtatcatgatattggtgattatttatctcgtgagcagaagcttaaaaagataagtgagtttggttccgttgattctagtaaattacaatgggagattgttgctccgaatgagaaaggggattggattaaccaacgaggaggtatatttgattcattgataatcttgggagacaaagaggataaaaataataaacaagtagtgtttgttccattttatagtagaggactggccactgcgagagacgcatggtgctataattcgtcatccgaatcattgaatgctaatattaaacggtctatggatttttataatgatcagagatatcaattgtcaaaaggatttataaaagatgtagaatatgacttaacacaaataagttggactaccagtgtcttgaacttagctttaaaaaatcaggaaataacccaagataaaattggagaaaaggtgataagtctttataggcctttttttaaacagataggatattattctcgtttttggaatgagcgtgtttatcaattgcctaaactttttccaacatctaaatataaaaatttagtgatttgcgtgaaaggaatcggagacaaagatttctcttgtctaattgttgattgcattcctgatcttcaggttatttttaatggtcaatgcttccctctctactggtacgaagaaaacaagaacaagcaacaaaccttgtccttattcgataccgaatcaagcgatgattacatccgtcgagacggaattaccgactggatactgaaagaagtccgtacccgtttcggtaatgcccggaagatcacgaaagaaaccatcttctactatgtgtatggcttgcttcattccccaaaataccgggaagcctttgcggccgatttgaagaaatccttaccacgtatcccgatcgtggaagatatagacgcattcctcgatttctcctatgcgggtaagcaactggctaatctgcatctgaattatgaggaaatacctgcgtatgagggcgtgacagtcattggcgacaggcaaaaggaggaagccccggatggtcgtatgattgccggaactacggatctatatgcggtcaaggtggattatactatgaggtagagaaaatgcgattccccaaaaaggggcaaaaggatacgattatctacaacagctcgattcgcatagagaacatacccgatgaggcgtatgagtacatcgtgaacggtaaatccgctatcgaatggatcatggagcgctatcaagtgaaaaccgatccaagtagcttgatcaagaacgatccgaatgactggagccgtgagcatgataacccccgttatatcttggacttgctactctccgtaatcaacgtgagcgtacaaaccatggagatcgtcaaaaagttaccggatttaaagttggaataagaaaatagtaaaaggggcttcttgtgaggaattgatatttattattttataatctagagatacacctagggataaagcttgcatgcatataaagtctttatgtaaaggagctaaaaaggtgtgtttatacgataaagtattatgtatttggggcggacgatgaaggagttgatctatattgtcagacctgttttaggaaatcggcttgtaaagtgttaatcattccttcggaaccaattttagggtgatttttcaatgaacatatccccctgtctttttattaatacggatttttttccttatattcgcgtcacttttgaacacgtatcaaataatttctaaataaatcaattaagaaatgacaaagagtgcattacaaatcgcaagagcagcttaccaaccgaaggtacccgctgcgttgaaaggtgcagtgaaagccgttgacggcgagtatactcaatcagtagccgatcaggaagaaatcaagaaattgttcccgaacacttacggaatgccgatcgttacattcgagaagagtaacgaggagaaggctatgcctgtcatgaacgttggtgtgatcctttccggtggtcaggctcccggtggtcacaacgtgatcgctggtttgttcgacggtatcaaggctcacaacgcagattctcgtctgtatggtttcatcttgggcccgggcggtttgatcgatcataaatatatggaattgacggctgatattatcgacgagtaccgtaacacgggcggtttcgatatgatcggttccggacgtacgaaattagagacgaaagagcaattcgataaaggtcttcagatcttgaaggaacttgatatcaaggctttggttattatcggcggtgacgattctaacacgaacgcttgcgtattggccgagtattacaaggctatcggcgccggcgtacaggtaatcggttgcccgaagacgatcgacggtgacttgaagaatgcccagatcgagacctctttcggtttcgacacggcttgtaaggtttactccgaggtaatcggtaacatccaacgtgactgtaactccgcccagaaatactggcacttcatcaaattgatgggtcgctccgcttctcatatcgctttggagtgcgctttgcagactcaaccgaacgtttgtatcatctccgaggaggttgaggagaagaatatgtctttggacgatatcgttacttacgtggctggtatcgtggctaagcgtgccgctgagggtaacaacttcggtacggtattgatccctgagggcttgatcgagttcgttccggctatgaaacgcttgattgccgagttgaacgacttcttggctaagcacgatgctgagttcaagatgatcaagaagagcgagcaacgtgcttatatcatcagcaagttgacgaaggagaactctgatctgtacgcttctcttccggagggcgtagctcgtcagttgtctttggaccgtgacccgcacggaaacgtacaggtttctttgatcgagactgagaagttattgtctgagatggttggcaagaaattggctgagtggaaggccgagggcaagtacgtaggcaagttcgccgcacaacaccacttcttcggttacgagggtcgttgcgccgctccgtctaactacgatgcggactactgctactctttgggttacacggcatcttgcttgatcgccgccggtaagacaggttatatgtcttccgtacgtaacacgaccgctcccgctgatcaatggatcgccggtggtatccctgttactatgatgatgaacatggagaaacgtcatggcgagatgaagccggttatccagaaggctttggttaagcttgacggcgctcctttcaaggcgttcgccgctaaccgtgacgagtgggctttgactactagctatgtatatccgggtccgatccagtacttcggtccgacggaggtttgcgaccagccgactaagactttgcagttggagcaagcttaatacagacttatacattatataatatataagctagggaggatgtcatttatttggcatcctctttttatttacatacatttgccacgagatcttaaacctaaaaataaatctttataacacatggattccatgaaaaagaaaatcgcctatctattgctccttttgatgctgatacctgtcggctcgttcgccaaggagaaacgtacgttcgagatcaaggacggtcatttttatgtaaacgggaaggtaaccccgatcctctcgggtgagatgcattaccctcgtatcccccaccaatattggcggcatcgccttcggatgatgcgagcgatgggcttgaatacggtcgctacctatgtcttctggaacctgcacgagacggagccgggtaaatgggatttcgagggagacaagaatctggccgagtatatccggatagcgggagaggagggattgatggtgatcctccgtcccggcccttacgtatgcgccgagtgggagttcggcggttatccgtggtggttgcagaatataccgggcatggagatccgccgggataacccggagttcttgaaacgcacgaagctttatatcgataagctttacgagcaggtcggcgacttgcaggtatcgaaaagcggccctatcatcatggtgcaggccgagaacgagttcggttcttacgtggcgcaacgtaaggatatccccttggaggagcatcgccgctacaacgccaagatcaagcggcaattggcggacgccggtttcaacgtgcctctgttcacctcggacggaagctggttattcgagggcggttccaccccgggagcgttgcctacggcgaacggggagagtaacgtggagaacttgaaaaaggtggtgaacgagtatcacgggggagtaggcccgtatatggtagccgagttttatcccggctggctgatgcactgggcggaaccattccccgatataagcgattccggcatagcgaggcagacggagacgtacctccaaaacgatgtctctttcaatttctatatggttcatggcggtacgaatttcggtttcaccagtggcgccaattacgacaagaagcatgatatccagccggacttgaccagctacgactacgacgccccgatcagcgaggcgggttgggtgaccccgaagttcgactcgatccgcaacgtgatccggaaatacgtcacttatgacgtccccgaggccccagcccctataccgctgatcgagatcccgtcgatctccttggcgaaggtagccgacgtgttggccttggcgaaagaaggggaaccggtagcgtctccgacacctctcacgttcgagcaattgaaccaaggatacggctacgtcttgtactctacccatttcaaccaacccctgaaaggccgtttggagataccgggcttgcgtgattacgctacgatctacgtggatggcgagcgtgtcggcgagttaaaccgttgcttcaaccaatatgcgatggaaatcgatatcccgttcaacgctaccttggacatcttggtggagaacatggggcgtatcaattatggcgaggagatcgtacgcaatacgaaggggatcatcagcccggtcaagattaacggcagcgagatatcggactggaagatgtacaagctcccgatggaccggatgccggctttggcctccggcgaaccttatgtctataagaatggctcgcccgaggtagcggcgttggggaataagccggttctctacgagggaaccttccacctgtccgataccggcgatacgtttatcgatatggaggattggggaaagggcattattttcatcaatggtatcaatatcggtcgctattggtacgccggccctcagcaaacgctttacataccgggcgtatggctgaacaaaggagagaataaaatcgttatttatgagcagctgaataatgaccggaagtcgagcgtacggacggtcaagactcctgtcttgacaaaactaaagaaaattacagccatggagaaaaagaatcgtttgatggataaagcggtaagcccgtttagcgtggatgagacgatgcggcggatcgaggagattatcaagtctcaaggaggttccgtgttcgccatgttcgatcatgggcgaaacgctagcgaggtagggatgaagctgcctccgaataaggtgatcgtcttcggctcaccgaaagtcgggactttattgatgcagcaagatccgtctatctctttggagctgccgctacgtatctccgtttgggaagatgcggacggcaaggtttgggtcggttccccgaatctggagacgatcgcctccgaatacgggatggaaaacagcggcgtcatcgagaagatgcaagaggccgtaacgaatatcgtgagtaaatcgatagctggtagccggtaaggctcatggatctaatgcgataagagcttaggaggatgtcggtaaaacggcgtcctcttttcttttatatggcccaagagactcatttaccgtgctgtagattgataataaggtttaaaagtcttcggaaaaattaggaatagattgtattttttatgcggtttttaacatattgttgattcttgtgaaggtgtctttttgttaacaagaataagccttattgggtctataatagctatttgtacgaacacatatccgcaagttcaagggaatgtgaaaaaaatatgcatactattgttgtttattgagaataataatttatatttgtacccgtatccgaagagtggatataattattaatgttaacctatttttgtgttatgatgaacaaacagttggcttttgttaaaagcgggctgggtttggcactttgtttccttatggtcggtgcgggtgtaacccctccaatccatgcgtctaacgcgaatgtgtccatctcccaacaagctaagaaagttaccggtacggtaactgacgcaaagggtgaaccccttttgggtgtgaatgttgtagtaaaaggtactacaaacggtacgattaccgaccttgacggtaagtattccttggaagttgagcccaactccattttagtcgtttcctacattggttatgtatcccaacaaattccggcttcgggagaagtggtaaatgtgacattgaaagaagatacgcaaaaccttgatgaggtcgtagtagtaggttacggtacgcagcagaagaaagatatcacaggctccgtggcagtagtcgatacgaaggaccttttggcatcttccggatcttccgctacccagcagttgcaaggtaaggcggccggtgtatatatcggtcagaccggttctccgggttctccttcaatggttcgtattcgtggtatcaatacggttaatgataacggcccattatacgtaattgacggcgtgtcaacacgtaatcaggatctaagtactttgaatccgaacgatattgagagtatgcaggtattgaaggatgcctcttctgccgctatctatggtgcgcaggctgcgaacggtgttatcttgatcacgacgaagaaaggtacgaagagcgggcaaccgagattaacgtacgacggttatattggtgtccagaagacgggtaagaaatatgacgtgttgaattctatggatcgcttgaacctagattgggaggcgcagaagaataatattgctatgcgtgatatcggaggttatccaagtaatcctcaatttggtacgggggatagaccttctatcccgaattacttgacacaatcaggtgctcagggttctactacaatagatccgagcgactatgattatcctactacaacttacgcaccattctcagatacggactggtgggatgagttagatcgtgccgccatgattcaaaatcaccagatcggcttgtccggtggtacggaaaagggacagtataacttaagcgcaaactatttcaaacaagacggtacggtaattgattcttactatcagcgttatcaagtgcgtgcgaatacctctttcaatgtacgtgactggttacgtgtgggtgagaacttaacgtatgctttcacgaaagataatggcttgagtgcgaatggagcggaatctaatccttattcgtggacatatcgtgcttctccttgggttccggtatatgatatcgcaggtaatttcgctggatcaaagttctccggtacgggtaacttccagaatccggtagccaatcaagtccgtaataaggacaactattatactcgcaaccgtatctttggtaacttatgggctgaggcggatattttcaaggacttgacattccgtacgaacttcggtatcgactatacgaaccggtattattatcgcatggaaaagaaaaatccggagttctcagagtctatgggacagaataactttgaggaacaaagtgagtttaattatcgttgggtatggacgaatacgttgacctataacaagacttttaatgatatccataaacttaccgttctgttaggtacggaggctatccgtgacggtctgggacgcaagttgaccggtcgtcgttacaattatttgtttgaggataatacgaatagttgggtgctgaatatgggtgagaataacaaccagcgtttggcgaattccgaatataagggtgagtttgctttgtttggcttgttcggccgtgtagattattctttcaatgataaatatttgttcacaggtatcatccgtcgggatggtgtatctcgtttctcaaaatctaatcgttatggtgtgttcccatccgcttctttaggttggcgtatttcccaagaggatttcatggaaagtacgagagattggttggacgatttgaagttgcgtgtcggttatggacagacaggaaactctgaggttcctcgtattacgaactatgctatggaacttgcaacttacccgaaacgttctgactacgatttgaacggacagaataattctactacaacaggtttcatcttagataaatatggaaacgaggataccaagtgggagtctacagagatgtggaacgtcggagtggacgctactttcttaaatggtaaattcaatattggtgctgagtggtattggaagaagacaacggatatgttgatcgaggctcaatattcagcgtttgctaacccggagatcaagaaaccatatatcaatttcggtgatatcaagaatacgggtgtcgatttgaacttgaattatagagattcaaaaggtgattggtcttgggacgtaagtttgaacctttcccattataagaatgaggtactgcgtatctcggagtcggatgatgcctctttgtggggagcgggaactcgcttggatggaaacgtgacccgtacgacgaaaggacatgctatctctgagttctatggttacaaggtgaatggtttctatgagaacgttgacgaggttttggccttgccgcctctaggacaatccggattgaacgctgagtccgccaaggcttgggtcggtaaatttaagtttgatgatgtggataaggatggtaagttgacggaaagagaccgtacgttcatcggttctccccatcctgatttgatcgctggcttaaacgctacggttacttggaaaaactgggacttcacgatgttctggtattcaactatcggcaatgacctgtttaacaatacgaaatattttacggacttctggatgttcaacggtaacaagtctgagcgtatgcgtgatcaatcttggactcccggtgctgataatagcaatgccattttgccgatcttggattcgaacgatggttattctggtaaattctcgaactcttattacgtagagaatgcttcgttcttgcgtttgaagaatgtggttttgggttatacgcttccgaagagcgtgttatctaaggtgggtatccaaaacttacgtttgtatgtacaagccgagaatttgctgactattaccggttactctggattggatccggaatatacgaatgcggatatgggcaaagaaagtgggggagacctacagagaggtgttgatatgggtggatggccttcaacgatgcgtttcttgttcggtgtaaatttcgctttctaatgtttagggatttgattaacttttaaaatgaattttattatgaaacacaacaaatatatattagcgttggcttttgccagtatgctgactttagggtcttgtggcgatgatttcttgggaaaggagccgcaaggagttttgaccccggaggctttggcgaatgctcaaggtgtggagttgctggttactagtgcttatgcgggtttagcctctcctgtggaaggatacgatccctatcaagcttctccgtttaactgggtatggggtggtatttatgggggtgatgccaacaagggatcagaccctaacgaccaatctacggtgaatgagatagaattgtataatacattgtcgaccaatggctatatcaagcaaaaatgggtttgggtgtatcaaatgagcaaacgtgttaacttggctcttcaggtcttggaaaaagcggaggatatgaaggaggaaattcgccaaatgcgtaaaggcgagttgaaattcttacgagccttggcttatttcgagggaatgcgtgtgtttggtgtttatctcccctatattgatgagactaatcaagagaatgacccaaaggtgcataatgacaaagatatctatagtttggtcgttgccgacgtggatgatgctatagcgaatttatcggatgatcctaaggttgttggtgaggttggtcgggcgaataaatccgcagcgaaggctttgaaggctaagatcttgatgtggcatggtgatttggcggaagcgcaacctatcttagcggatgtgttgacaaatggtgttacgtctaagggtatggcttatggactggaagatgatctggacaataacttcaatgctttgacagaaaatggtaaggaatccgtttttgcggtacaatactcaaatgcggcagagaatatggggggggctcccttctgtttagcttatccgcataatacaggtcccggtggatgttgtggtttctaccagccttcttttgagttggtgaattcgttccaagtagatgcgaatggccttccttacttgaacggtgaatatcgtacgaagaagagtgtatcagttcgtaactccgatagttcccaagatgctgtgctagccgttaacgataataacattgcggtcgatcctcgattggattttgctgtaggtcgttttggtattccttataaggattggggattcccagagaatggttgggtacgagatgctacgaatggcggtatcttcatgccgaaaaagcatgtatatagcaaggctgaggatgcggctggtatgaaagcgttatatggtggttgggcaccgggttctgctatgaacttgcaatatttaagtgttcgtgacttaactttattatatgctgaatgcttggctaacgctgggaatctgaaaggtgcgatggagcaggttaacaagattcgtcgtcgtgcggctttggatgttaatattgttaagttagatgatgggactccagccgctaattataagattgccgaatatccttcttcacatgccgcattctcaaacaaagatgtttgtatcaaggcgattcgcatggagcgtaagttagagttggctatggaaggtgagcgctggttcgatttgtcccgttggggtggtgatgtgatggctagtgagttgaaagcctatgtggactatgagaaacagtatatctctaagtttgcgggtgcctcttacctgccggcaaataagacaatgttgcccgttcctgacgatgagatcttgactttgggtacagatccggaaacaggtactccgtacttggtacagccggaagcttggagaaactaaaggtttatggcgataaggaaggcaggggacttccttatcgtttttattttgaatggtgcttacagattcttgctcttaaagagtttgtcttcttatattttagaattcttttttattgaaactcaattaaattttaaaattatgaagaagttattatgctgttttattattttgtgcctttctgtgtgttctttttctacaattcaagctgtagaagtggaaaacgataatgtagatataatggcagttgctgctgctatgtatattaagggggaaacttctttgaagtttagtggtggttacgcagggtcgtcttaccaactgttcaatgctcctagtggtgctgaatttagatggagtattgtaggttctgggaattgttattgttatccgaatggtgattattgttcgattaacgtatattctccgggttcttatcgactagtttgtgatgtatatgttaatggagttagggtagatggagtgacaacttatataacggttatgccatagaagagtttgtcttgaataattgatggttatatgttcttttataaccacaaaaggaatagatggtttaataaaagttaaagggtatgcatcacggcataccctttttgcttgaagaaaatagtattcttcaaattcccatttcctctaataaccccagtacttcaagaggcaccctgcgcaccccgctatgaggagggtgtagccggagatacccagccagtccgccccggggggcggtggggaggaggggtgccgtcgtggcggaagagcgtcagcgaggcgccgatcgccgctagcgtcacctccgtctcccgcatgaggagggagaggagggctagcaggagaaggagcagcgccggtagcgtctgtcgtttcgggaacagggggatgctgcgggaagatgacccggaggagcgccgtgaggcaacggaggatgagttcaaggtatttcattttagttgacagttgatgataggggcggcatctgcccgcccttttgattaacgattgatagttgcgagctgatttttcggcaaagctggacgatcagcttacgataggcttccctgttatcgccgttcacctcgctgatgtaggggctgtaggcgatctccttggcgaaggccgtaggattggcgctcatgtcggccgcccggggataggccgagcgaagcaggcggcagtaatccatgaacgagcacttatcgtccgggtagatccggaaacgtagcgagcggggcgacagctccgtccaccggccggtccaccatacgttgggcagcccgtaggccgtgatgccgaaaaagttatgatactcccggcagagcgtactctcgccccaacccgtctcgatggccgcctgtgccaagatcaccaccggatcgatccggaacgcccgcccggcctccccagccagcggagcgtattcacgtataaaaacagaaatctccataccacttaattttcaattttcaattttcaattttcaattttcaattccctaaatctcgtccgggctctcggaatcgcccccgccacctcccggggtcacctctccgttcgagtactcggtgtactcacggagcttggccgtcagcttgagcgaggcgctggagaggttgcccgtggcacgggcacgaaggcgtacgccgatgatattgccttgcgtggagaaatcctccggcgtgacggcccccttcgagcggatgcccacgctgaagatgccgaggtcgtctatcttcacgttcttgccgtccatcagcagctccttgatacaattcaccatgtccttcagcatgccgtggatggcgccggtggagaagggggtgttgtgggtggacatgtgctcggccaaggcggcgatgtctaccgtctcctcgcatacggcacgggcgtaccacttgttgaaggttgtcacgttcttctcgttcttgttttgatacttcttgtagcggatcataatgtgttgttttttaatgttgatacaaagatacggcagggcgtgagggctttgtcgctttgggtgacttagggtgatttcgggtgaattatttctccggaaaatgatggatatatgccggagattcactatctttaggatatggaaacgacattcaagatacgagcgtacgggcggatggagctggccgaggtctacctgcccgacctgcatccccgctcggcccaccgcaagctgcaacattggataacgatctatcccggcctgcccggtcgcctcctttcgctgggttatcacgagggcgagcgggtctattcgcccgccatggtgcgggccatcatcgagtcgctcggcgagccgtgagagccggatggtatccgggtggaatagggtcgctaagtcaatggaacgcaagacggattccattgacttagcgaccgtatctcattggttttccggtcatgtttcttaatcccgacgaatatcggtgccggggttagggcgcaaaaggcgcatctttacgtgcctatataaaacttttcttgtaaatatattttttcatcacactgctatagtgtgatatatatttatttttttgtaaaatgtttttccagacactgttttttgcgccttttgcgccctgctcattttagaaagtcagtttttattccggcttatcttcttgacccttaaagatatcattctccttttgggctctatcctcttcctcttgcctagggcgcaaaaaattggcttttacctgttccgaggtgatctcggcgacctcaaacagtagttttcctctagttttcgtgagcttaaaaccgtgttttttcagcaccttgctcaacgtaactatattggaacgtgtcggcgtgatacgtgtaaatacacttagtttcgtcataatatcgctcgccgtaagatactgtggcgtgtcaaaacgctccggtttgcggaaataggtgaagaacaattcctcctcggggcttcgctggcggaaggtctcgttgttctcgttgatctttcggatgtcttcgccggagaaccagtatttctcgccccggcggaagagggcgagggcttgggcgtagatgtcggcgtgtcgcacgggcgactggtaatcgatccgtgtggcctcgaagcagaggaagcggcgagactcgttatcgtccggcagcgattgcaagtcgttcaccgtggcggcgaaggaggcgtggcgtatctgcgtctcggcatagtgtccgtacgggcggcgcaggtagatgacccctgtggaggtgagcgccttgaggcggttcagatcggcgtagctctggccggacatctcgtcgatgacgatcaagaggcagtccaccatcatctgtgggaaacccttgctatacggattgacattgcccgtgaaaagatagtcccgcaactcgggcggcacgaggttccgcagccacgaggtcttgcccagcccctgcccgccggccagcagcaggatggtatggttttccacgcctagctccatggagccggccacttgcgcgataagccagcgcttgaggcaaccccgccagaaggcgggccgggtggtgcccacggtatcggccagctgcccgatccagtccgtcaccccgtcccacggggccagcccctcgaaatacgagcggaaagggtggaacgtctcgctgaagtccgacatcagtatggcccggatgtcgttatgcgagcagtagtggccgtccttcaggagactccgccagagcgagttcacccagtagtcggtcaccggcttgaagaccggcttttgaccgttccgctttttcttcgtggctacctccacgtaccccctcacggcgttcttgcgggtgaggaaacgctcggatatataattctccacggcgaccacgtccagcgggcccccgccctttttccgggaggtggcggcgctcgtctcggcggcgtgctcctccacgtggctgtaggcgctctcgatggcggcgaggtgctcctccgccggcaagtcggcgaaggcggtagcggcgtaagcctccatctcggcccgcttcacgcccagccggttcgcccgtgcggccatgacgaagatgaagttattacggttgccctcggcgtaggcgcctttccgctcggcggtccggcgtgccttctccagtggcgaggccaccttcctttccttcgccccgggagccgtctcgctaacctcctccttccaagtaaggggtagcggggcgaggccctccggtagctcgccggtaccctccagccaagggcggtaggcaggcgagaggtatagggcgggatcgtccgatacgaagcaaagccgcccgatgtcgctgcccgaggtatccagctccacgccgagccgggcggcgtaccaacggctcatggcctcgtagaccctccggtgattgcccggcgtggcggtctcgtccgtggcggcgtaggcgatgagtttcgccccgtcgccgctgggactgcggaaatacgccacggtgtagggcgcttccgtggcgagcggggtgatacgctccagctcccgttcccctacgtggtcgatgtcgagtaccaccaattggttatagcgggtgatgtgagggtcgaggcgtttcccggagtaggtggcctgtggggtgaaagcgggcagttttttctttagtttggcagccagttccttatcgcccgacgctagcgcctcccgcgtctcatcgatgaactgcttgtacgttcctctttggatgttttccagtacgcccgctagcgaggcgtctcccttgtatcgtccgaaaagggcgaataatgacgtgtttatcatactatgtttttaagtgataaaaaaagagccagtgtctctggcttgatgccgctaaggtagggaggcgctttgggacgcctcccaagttttaacttttgttgtgaaaaacgggaagcttgttattcatgcgctttcccgtattcctcctgcgccgtcgagaggatgctccggaagctccttggctccgggcagccgttggggtgtatctcgaacacctcgtccagcgcccgtatcatggcttcccggttcgtctgcccgttcacccggaaccgcgggtcattgaggatgggcagcgtcagccgcacgaagtctttcacggagcccgtgtagatgatcttctcccgtttaaccagatcctcctccggctggtagtctttaaacaacttatgcgcccccttcgcgtcttttttcaagtccacccatgccttttgggcattttccaaactatccagcagctttctcacgcttgtttccgcttcccggaaactgattttttttcatatatgattaattgttaaagttaaaaacgtcgcaaaggtatattatccacgtgataattcctcggaagttgttgctttgccggatatatatgcttacatttggcatgaaactttaaatctggatcttatgagaaagcttctggggtttttatgcgtatgcgcgttggctatcgctacggctagggcacaagatgcggtggatgactatgtctcttccgccgccggccaatccgtgatctaccatgggaaggagcaattaaaatatcccacctcgataagaaatcacccctatttgaagagcgagaaatacgtacccggggatcttagcttcgaaggcattctctacaaggacgtgaaaatgcgcttagacctgtacaagaatgagttattactgctctctccggataatcgctataatatcgtcttgccgagcgatcgggtagactacgctgagtttcatggctatcctatcttctacaggtatccggacgagcggtcgggtaacctgccggaaggctattacctacggttgtatgaagggaagtgtaccgtgctggggaaatggtcttgtatattatctaagacgataaaagatatgcaggtcgatgaatccttcgatcagtccgtaaaatactacatccggaaggagggcgtttactataccgtgaggagcaaaggctccgtgttgaaggtcctcaagtccaagaaaaaagagctggcccggtatatcaagcggcgaaagctggatttcaagcacgctcccgaggaagccatcgtagccgtggtgagacagtatgaacagttaaacgagatcccatgagaaagagcctatatatcggtatggtaatgtgcctgctgtccggctggacggcgagggcgcagcggacggtcgatctggatttccggcaagtaaccttaaatgtcgtgttcgacgctatcgagcggcagaccggacagcccgtctaccggcaacccttggagacggactccatggtcgttagcgtacacagtgagaaggaagagcccttggtggcgttgcggcgtgcgttggagggaactcccttccaagtatcctcgtatggcggcgccttctttgtattgagagataacaccttgatgacctccctgcccgagaacttcttcctgcgggagaagcggagagagggcgatggcgacgaggaaggctccggtatctccctgatggcgggccggaagcagcagaaggctacctcggagaacaaggtctacgagatcggcgacgcctcgggcaaggcggcggaccgggtcacggtgaccggtaatatcagcgatttcaagaccggcgagccgatggtgggcgtggccgtgttcgtgaaggacccgatgatcggggctactaccgacgcttacggctattatacgctgcgcctccctcccggacggcacgagctgtacatacaaggcatgggcatgaaggacacccggcggcagatcatgctccattccgacggcaagctggatatagagctggaggaacaggtctacaccttgaaggaggtcacgatctcctccgagaagatcgccaacgtgcggaatacgacgatgggcgtggaacgcctgaaggtgaaggatataaagaatatcccgatggcgttcggcgaggtggatatcatgaaggtagtcatgtcgctccccggcgtgaaggcggtgggcgaggcctctagcggctttaacgtgaggggcggggcgacggaccagaacttgatcctcttcaacgacgggacggtctataacccgacccacctgttcggcttcttctccgtcttcaaccccgacgtggtgaaggacatggagctgtacaagagcagcatccccgccaagtatggcggacgtatctcctcggtactcgacatcaacagccgggagggtaacaagaaggagttcaagggatcggcgagcatcggcttgctgaccagccgccttaccttggaggggcctctcttctccgagaagacctcctttatcgtgggtggacgtaccacttactcggactggatcttgaagaaactccccgagaagagcggctataaggatggcaacgccggtttttacgacctgaacgccacgattaaccataagttcgacgagcggaacaacctctatctgaatggctactatagccacgaccgtttccgctttaacgtggatgagcgatatgcctacgagaacgccaacgcctcggtgaaatggaggcatatcttctcggatcgtttcacgggggtcctcaccgccggctacgaccattatggctacaatacccgtaatacggataacccggtgaacgcttattccctcgctttccgtatcgaccagatgtacgggaagatggacttcacgcattacctgagcgataagcatacgctggatttcggcgccagctcgttgttctacggcttggagccggggaaataccttccctatggcgaggagtcgttggtgaaggaggaccggatggagaaggagaaagcggtggagtccgctatctatgtgggcgatcgttgggatatcacctcccaactctccttgaacgtgggagtccgttattccatatttaacgtattggggccccgtacctataatctctatgccgacgaccagctgccttccttggctaccgtgacgggcacggtggataagaccggggcgttcaagacctaccacgggcccgagttccgcatatccgcccgctacgcctttaccgaggacttctccgtgaaggccggctttaatacgatgcggcagaatatccataagctatccaacacgaccatcatgtcgcccacggatacgtggaagttgagcgacgctaacatcaagccgcagacgggtatgcaagtggccgccgggctataccggaatttcttgagcaatacgatcgaggtctccttggagggatattacaagacgatgaaggattacctagattaccggaacggcgccgagctgctgatgaaccaccacatcgagacggacgtgctgagaaccgaggggcgtgcctatggcgtggagctgatggtgaagaaaacgcaagggaagttgaacggctgggtaagctatacctactctcgcacgcaactgcggcagaacgacccgatgatcgtgaatcccgtgaacaagggggattggtacgccgccgacttcgataagccgcacgacctgaagttcgtgggcaactataagttcacgcatcgtttcagcttctcgctgaattgcgactatagtacgggacggccgatcaccttgccggtctccaaatatcattacgggggcggtgagtttgtctattattccgaccgtaatcaataccgcatcccggactttttccggatggacgcctcgttcaacatcgagccgagccaccacctgacgttgctcacgcatagcacgatctctttcggggtctataacctgacggggcgaaagaacgcctactcggtgtattatatatcggagaacgggaaattaaagggatataagatggcgatattcggggtgcctatcccgtttgtctcttataatattaaattttaggggggagttgagatgaggaaagaagcgaagataaaagattctataaaaggctttcattggtggctgggggctttgctgttgttattgtccgcctgtgtcacggattacgagccgaagggcttggagcaggtacgggatttgttggtcgtggatggtatcatcacgaatggcgagactacgataaagctccggagaagcgtgggcctgaccgacgatttcacggaggatgagttcgtgaataatgccaaggtggtggtggagcgtgaggatggagctgttttcacttgcgctaattcttccgggaagggagagtataaggtggatatgggagagctggacccgggtagccggtaccggctacatatctcgctggatgggctggagtatgagtcggactatctgggaccggagataacgcctccgatcgactctctctccttgctgaagaaggggccgggagaggaggtccgtctctgtgtgtctacgcataatgccccggatcgatcctcttatttccgctggatgtataaggagaattgggaggtgaaggcggagatctttatggccgccgagaaaatgggtaatacggtcgtaatatatgatttacttacatcgaataattggtattattgctggggaaaggacagctcgaaggtgatctccctaggcagttccgataggctgacgcagaacgtgatcgctaacaaaagtatcgcctcgtatcatcccagcgatcgccgtttctcgatgttgtatcatgcggaggtggaacaatatgcgttgcaccgggaggcttacgactactattttaatttgcagaagaacatagaggagtctggtagcttgtttgcccctattccttcggagatgaaagggaatatccgttgcgtgacggacccggaggttccggtgatcggtttcgtggaagtagcgacagtgactcgcctcaagcgtttctttccggagatagagaaggtatatgaggccgaggttacgggctgcgcaagcacgatcgtacagggatcggaatatgataataatccggattacggatatgtttcctataatccgatgaatgcggagagtaatacgtatgcgctgaaacgttgtatggattgcggccgttttggttcgaaacagaagccctcttggtggcctaccagtcatttataatttagttgctatgaagaagtctatgataaaacaatgtatcttgtcgctcctctgccttttatgggtggggcaaacgcttctcgcaggggaattgcgagagcgggtttacctgcaaacggataagcaattttatctgtcgggcgagcttatatggatgaaattcattgccacggatttggaccaacggttatccgacgtgagcaaggtcgggtatgtggagcttctggatagcgcctcggcggtcgtgcaagcccgactcgtgctggagaagggggtagggaatggctgcctgcagttgccttctaccttgccgaccggaaactaccggctggttgcctatacccgttatatgcggaacgagggggaggaggtcttctttgagaagccgctggcggtggtgaacaccttcgtgacgaacgagaccctgctgacggatactttattgcccgcttactcttttacgaggcgagagggcccggtttccgtatcgccggaccgtatgacctatgatacccgttcagggggggagatccggataaacggcctgcccccggatctacagaccctatcggtctctatcgccgggatcgacttgtataaaccttccgcccggagcggtatcgttgattggaaacaaagcatgcctactacgggatcatcgcctgccgatcgtaaattcttggcagaatacgaggggccgatcctgacggggaaagtgatcgatctgtctacgggcgaaccttcgtctaaagaggcggtgaggcctttattgggcttttccgggggtgagatccgtcttttcggggggcaactgggccctgccggggaggtgactttctttacgaaacatatatccgggacgcacgagatcgtgacggtggctttatccccttcctcctctcgctaccgggtggacatcgaatctccttacgctacgcatccggagaaggagcttcccgccttgagattgaatcccgcttggcaagacgagttggtgaagcggagcgtggggctacaggtgttgcatgcttatcggtctgattccttggttcgggaaaaagcggagaagccttggttccagtggcaaccggattggagttatcttttagatgagtacacccgtttcacgacgatggaggaggtcgtgatcgagtttatccccggccttcgtttccgtaagatggatggggttcgccggttggcggtcctgaccgaggagcggatcgggtatacgatcggtaactcattggttttattggatggtatccccatcaccgatcacgagatcatttttaagtacgatcccctaaaaatccggaagatcgatgtgtataaaggtaagtacgtattcggtgggcagatattcgacggtatcgcctccttctcctcttacgagcataattacccgggtctggtagtcgataactccacccagttctttgattatgagggcacgcaagcccagcgcatcttctatatgcccgcttaccggacagaggccgagaagcgatctcccgttccggatttccgccataccttactttggcgacccgatatccggacaaacggcgagtcctctatatccatcccctttaccacctccgacctgaccggtgatttcaccatcaccatcgaaggcctgacccaaaccggggaggccctctacgcgacggaacaatttcaggtaaaatagcgtgcgatatggattattctatttatctttgtcttgacaaataaaaaatcttactatgaaaaaagaaatcggaaaatggttgatggatatcgctaagtatgtagtgactggcggaatcattagtacattcatcagtaattatcaacagcagagttgaatcatttatataaatgcggcaattgttgctataattactttttgggcgggtacccgctattttaaggaaggagaaagggctgaaaacagtaaaaaaaggaggaaatagttatgggaccttatttattcttttgtagtatagtggttattccttgtgtcgtttatctgatatattcatatacgcatacaaataagaataacgtaatggatagcgataaatagttacttggatatcctcgttctcatcttaaatccgtacttttggcgaaaaatcagatttgaagatgagaagtttcgctagtgacaacaattccggcgtgcatccccgggtaatggatgcgatcatcaaggcaaatgataatcatgcggttggatatggtgatgatccttggacagaggccgctacgagtaagatacaagaagtgttcagcaaggatgcctctccttttttcgtgtttaacgggacgggggcgaactccgtggccctgcaagccgtgacccgtccgtttaatagcatcctgtgcgccgagaccgctcatatcaacgtggatgaatgtggagctcccgcacgaatgaccggctgcgccatcgtcacgatccctacgacggacggtaagctgacaccggaattgatccgtccccatctgaagaacttcggggtttgccaccactcgcaacccaaggccgtttatatctcccaagtatcggaattaggtacgatctatacgatagaggaagtgaaagcgatcgccgatctcttacattcgtacgatatgtatctgcatatggacggagcccgcttggcgaacgcctgcgcttacctgaattgcacgatgcgccaagtgaccgtagacgcaggcgtggatatcttgagcttcggaggcacgaaaaacggtatgatgatgggagaggccgtggtatcgttccgcccggagatcacggagaacctgcgattttaccggaagcaatccgcccagctagcctcgaagctacgttatctctccgcccagttcatcccttatctggaaaataacctttggctggagaacgctatgaaagcgaatatcagcgccgccaagctagcggacgtgctacgacaatacccggaaattcattttacgcagaagatcgagtccaaccagctcttcttcacgatccctgccgaggcgttgagaaagttgcaagataaatatttcttctatatgtggaacgaggagatcaacgaggcccgtctcgttacctcttgggatacttccggcgaggatatcgctgagttcgagcagtcattgaaagagatattcggttaaggtatagatataaaatgaatataaacattagatcgaatcctatgaggaaatggtttatttgggcgatcgttatgatcggatgcttgcccataaataaggcattggcacagcaaagcggcgatgccgagcggaatacgttgcgtatcatgagctataatatccgcaacggaaggggcatggatgaggtgacggacctcgggcgtatagcggacgctatatgtaaggtagcccccgatatcgtcgccgtacaggaggtagatagcgtgaccggaagaagcggcgggatcgacgtgctccggacgttgggagaacgcaccctgatgttccctacctacgccccggccatcgacttcgatggcggtaaatacggagtaggtatgctgagcaaggagaagccggtgagctaccgctatatagcccttcccggacgggaggaggaacgggtcttgctatgggtcgagtttgagagatatatcttctgctgcacgcacctttccttgacaccggaagaccggatgctctccttgccgatccttcggcgggaagcagctttcgctcataagcccctgtttatcgccggggattggaacgctacggcgcattccccctttatcacggaaatcagcaaggatttccagctattgagcaatcctaaacaggctaccttcccggcttccacgccggatagctgtttggactatatagcgggttatgtaaataatggacagccctttacccgtttgtccgcatgggttcccgaagaggcggtggcatcggatcatcgcccggtcgtaacggaggttcgcctgaaggccaagccggaagagatcttttatgcggcgccctatctccaaaatcctacggagggcggtataacggtgatgtggcagacccatgtccctacgtatagttgggtagaatacggtacggacacgctgaatttgaagaaggcccgcaccatcgtggacggtcaagtgatatgcaacggcttgcataataagatccggctgacggacctacgaccggggcaaacctattactaccgggtatgctcgcaagagatcatgctttaccaagcctataagaaagagtttggcgagacagcggtatccccgttctacactttcaaggtcccttccgcatcccaagaggatttcacggcattaatctttaatgacctgcataagcagatcccgaccctagacgccttatacgagcaagtgcgtgatatcccttatgatttcgtggtatttaacggggattgtatagacgatcccgccaatgagaaagaagctttgtatcatttggcttatttatgcgggaaggtgggcgccagtcatgtccccgctttcttcctaagaggcaaccacgagatacgcaacgcttactcgatcggcctgcgtgccttgtttgactatgtgggcgataagacatatggggcgttcaactggggagatacccgtttcgtcatgctggattgcggcgaggataaaccggatagcacatgggtgtattatggcctgaacgatttcaccggtctccggaaagatcaagtgaatttcctctcgaaagaattgaacggcaaggaatttaagcaagcctcgaagcgggttttactgaaccatatccctatctacggaaacggagatgcctatgagccttgtccggaactttggggaaacctgttggcgaaagcccctttcaacgtgaatatatccgcccatacgcatcaatacgccttccacccgaaaggctcgttgggaaacaacttcccggtgatcgtaggcgggggttataagctcgattcggctacggtgatggtattgcggaagaaaggagacgagatgagtgtacgagtgttgaacgcaaaaggggagaccttattagacttgaaactataagagacaggatgaatacggatttgatttacgggatcgatgaccgtccgcctttgaaagagacgctttttgccgccatccagcatctgctggctattttcgtggcgatcataacacctcccttgattatcgccggggcgctgaaactggatctggagacgaccggtttcttggtttccatggctctgtttgcctccggggtatccacattcgttcaatgtcgtaaattaggaccggtcggggcggggctgctatgtatccaagggaccagcttctcgtttatcggcccgattatcacggctggcctggcgggagggcttccccttattttcggcgtttgtatcgccgcctctccggtagagatgatcgtgagccgtacttttaagtatctgcgctcggtgattactcccttggtatcgggtatcgtggtgttgctcatcggcttgagcttgatcaaggtaggagtggtcgcttgcggcggggggtatacggctatggataacggtacgttcggtagtttgcgtaatattggggtagctgtgtgcgtcttgttgagtgtcttgttcttcaatcgttgtaagaacaagtacttgcggatgagttccatcgtgctagggttgtgtatcggttatgcgatcgctttcgccatggggatggtggatatggaggctgtctcctcgcaaaacctgagagggtttaatatcccggttcctttcaaatatggattggattttaatatctcttcattcgtggcgatcgcattgatctatctgatcacggcgatcgaggctacgggggatattacggccaactcgatgatatcgggaaaatcgatcgagggagaagggtacctgaagcgagtctccggcggggtgctggcggatggggtgaactcatttatctccggaattttcaactctttcccgaactctatcttcgcccagaataacgggattatccagctgacgggagtcgccagccggtacgtagggtattatatagcgggtatgctgatcctgttgggtttattcccggttgtcggcgttattttctccttgatgcccgatccggtgctgggaggggctaccctgctgatgttcggtacggtggcggcggcaggtatccgtattatcgccgctcaagatatcaaccggaaggccacgttggtgttggcggttagtttgtccttggggttgggggtggagctgatgccggatattttaggggccgctcctcaagtgatccgtggcattttctcatccggcataacgacgggtggcttgacggccattctggcaaatttatttatacgtgtaaaagaagatcaaacagaataacaaattatggaattattgaagcaacgcatcttgcaagacggccgctgttatcccggcggtatccttaaagtggatagttttatcaatcatcaaatggacccgatgttgatgtataagatcgccgaggaatttatccgtcgttttcaagatcgtaagataaacaagatcgtgaccatcgaggcgagcggtatcgccccggccattatggtgggttatatcatgcagttgccggtggtcttcgtaaagaagaagaaaccgaagacgatggagaacatgctctctaccgtggtccattccttcacgaaggatcgtgactatacggtatgtatcagcaataatttcctgactccggaggatcatatcctgtttatcgatgatttcttggcttacggaaacgccgccatgggaatggtcgagttggcggagcaatcgggagccgtgattgagggtatgggttttattatagagaaggcgtttcaagatggcgggaatctgctgcgtgaaaagggcatacgtgtggagagcctcgccattatcgataatctggatgattgtaagataacggttcgttaatagaaaagatatggatgagagaataaaagaaaagttgattaaccgtgcgaagacgaatccttatgtgaattttctggggatcgacttcacggttatcgaggaaggtcgtgtggaggcgcatatgcccttgcatgacgagcagagacaatatagcggcgtgacgcatgggggtgtcttggctgctttggcggatacgatcgccggtttcgccgcctatacgatgaccccgctggagaaagacgtgctgacggcagagttgaaaatgtctttcttacgggccgcttggggcaatgagctgatcgccaagggtaccgtgatcaaggcgggacggaatatacatttttgtgagtgcgagatttattgcgacgataagttggtgagcaaatcttccggcaccttctgtgtggtccatccccaagtatagaaaagatgttacttatttatcaatatcatgaagacttcaaatgtaaaaagaatcctttgcggctgcctgttgttcgccgctacgtggccggcattcagccagcctgccacgaatccccgcctgatcatccgtgcggatgacatggggtcgttccgttccgccaatatagcgtgtatggaagggtataagaatggggtggagacctgtatagaggttatggttgtcacctcgtggttccccgaggccgcccggctgttgagggagaacccggggatagatgtcgggcttcacctgacgtttaccagcgaatgggataacgtgaaatggcgtccgctgacgcattgtcccagcttgaccgatagcaatggctatttcttgccgatgatgtctccgaattccgcctacccgggtctggccattctggagaatacatggagcttggccgagatcgagcaggaggcccgggcccagatagagatggccttgaagaacattccccagatcagccatatctccggccatatgggatcgaccggtttcgatccggaggtggtgaagctgatgcgccgcttgtccgaggaatatcatctgccggtcgtggatcgggtagaggcgatgcaggaatatgatttcacctattccgggtatgatggagcctccaagaccccggccgagaaggaggccagtttcatccggatgttggataagctggaacccggtaaacgctatatgttcttggatcacccggccttggataacgaggagatgaaaaccgtcgggcatatcggctacgagaacgtggcgatggaccgtcaaggcgtgaccgatctttttaccagtccgaaggtgaagcaagccttgaaggataagaacatagacttgatcagctataacgacctgaccaaggaacttcctcgtgcggaagcctcgaaagccttggataaggcgtttggcaattacctgcgggcggtgaaaaaggcggatcaagacttacatagtatcatgatcctccagcatggaaaggtcgtaaaggagcaatggctgggtgagggcgaccgccatacgccgcatatcttgaactccgttagcaagacctttacggctacggctatcggttttgccgtcgcggagggtaaattgaaggtcacggacaaggtgatctccttcttccccgaccaattaccggccgaggtaagcccttacttgaaagagctggagatacgtcacctattgaccatgtcctccggccatgatgtcgatcccaccgctttagtacggcaggaggggaacgagaaggccgattgggtaaagattttcctctcggcgccgttggtacataaaccgggaacctatttcgtatacaacagtctcggcacgtatatgctttccgctatcatccagaaggtgacgggggagaaggtgatcaattatctctatccccgtctgtttcgtccgctgggtatcgtcggcgctacttgggaagagagtccccaaggcatcaattgcggcggttggggattgtatctcaagaccgaggatctagcgaaaatgggtcagtttttcctgcaaaagggaaaatggaacgataagcaattgctccccgaaagctggatagaggaagccaccacctccaaaatagcctctttgcccgccggtatgagaccggagaacttgaagatgaagccgaaagatagcgactggttgcaaggctacggttaccagatgtggcgttgccgccataacgccgttcgtgccgatggagccaatggacaatacattattatattgcccgagcaagatgcggtaatcgccatgacggcgaatatcggcgatatgcaggccgagatcaacttgatatggaaatatatcttgcctgccttgagataggagatgtaggccctacgtccgggaaaccaataagagcccccggacgtaagcctatgacttgttgggcgtaagcgaatggtttgcggtacgtaagtcaatggattacgggaaaaactcaatgattcccaccccgtaaaccattgggttacgaaaaaagaaaagccttctggtcacagaccggaaggcttttcttagttgcggaggcaagactcgaacttacgacctttgggttatgagcccaacgagctaccactgctccactccgcgatatagttgctatcatttcttgattgcgagtgcaaaggtagggatattttcttacaaaacaaatttattgcaagttttttttaatatacttggtagatacgatcttttttaagtactttgcgcacagttttaatcaaaatgtgcaatacaatgccgatgacagtttctaaaacacgtgacatgttggtggatgtggccagacaattgtttgcccgcatgggggttgataacacgacgatgaacgatattgcacaggcatctcgtaaggggagacgtacgctttatacgtactttaaaagcaagaacgagatctatttggcggtagtggagtcggagctggaccagcttcataagatgctggtggacgtggccagcaaggatctgccggcggacgagaagctgctgacgtttatctatagccgcttggacgctgtaaaggcgttggtgtttcggaacggtacgttgcgggctaccttcttccgtgatatatggcgggtggagaaggtacgcaagagcttcgaccttcgggaagtggagatcataaagggaatattggacgatggcgtgaaggagggtatattcagcatgccggacacggacattaccgccctcgtgctccatcatgccttgaaagggctggaggtgccctatatccgggggatcatgggtgataatatcagccagcggattaaacgtagagacaatgttatgaatttaatattcaacggaataaagattaagtaaatcaaagacactaaggatgtttattaatgcgacagggttttatgtgcctgaagaacgggtagataaccaacattttcttgaattaaacgggttgacgagtgagtggattgagcaacggacgggcattcatacccgctcgaaagcgaaagaggaagagaatatcaataccatgagccttgaggccgtgaaggacgctcttcccaaattgccttacgatatcacggaggtagacttgatcgtctccgcttcgtattctccctatgatacggttgcgacggccgcgcatacggttcaacatgagtatactatcgctgacgcgaaagctttatatctatcctcggcttgttcttctttcttgaacgccttggaggttgtggagggatatttcgccatggggaaggcttccaaggctttggtgctttccgctgataagaactccgcttattataatgagacagacccgaaggcgggccatttatggggtgatgccgccgccgctttctttatctccaaggagcggatcggtgagggcgacgccgagatcgtagaggtttacacgcaaggtctcggccatttgtcgaaagcgatggaggcggttcacttgcgtcctcgtgacggcggtatcttgatgccggaggggcgtgacgtatttatccaagcttgtacctatatgcctaagaatgtccttcatttgttggagaagaacggttatacgctggataaccttacttatttcatcggccatcaggcgaatatgcgtatcatggcgaatatcgccaagcaattgaacttgccggacgagaaatttttacacaatatcgaggagctgggaaatacgggttccgtaagctcggccttggtatatgcccagaacgataagaatttcaagaaagacgacttgatcgctatcacggtattcggcggtggctattcaacgggagcttgcttgattaaacattgatattaaaaaatttgagtaatatgaaactattagaaggtaaagtggctgtcgtaacgggtgccgctcgtggtattggtaaggctatcgccttgaagtttgcccaagagggcgctaacatcgctttcacggatctagtgatcgatgagaatggcttggctacacaggctgagatcgaggccttgggtgtaaaggcgaaaggatacgcttccaacgctgctaactttgaggagactcataacgtcgttgccgagatcgtgaaggatttcggacgtatcgatatcttggtgaacaacgccggtatcacgaaagacggcttgatgatgcgtatgagcgagggacaatgggacgctgtgttgaacgtgaacttgaagtccgctttcaactttatccacgcttgtaccccggtcatgatgaagcaacgtgcgggtagcattatcaatatgtcttctgtcgtaggtgttcatggcaacgccggacaagctaactactccgcttccaaggccggtatgatcggcttggctaagtctgtcgctcaggagttgggttctcgtggcattcgtgcgaacgctatcgccccgggatttatcatcacggatatgaccgctcagttgtctgacgaggtacgtgccgagtggtgcaagaagattcctttgcgccgtggcggtacggtagaggatgtggctaatatcgctaccttcttggcttcggatatgtcttcttatgtatctggacaggttattcaggttgacggcggtatgaacatgtaatatggaggttatttacgaggataatcatattatagcggtagataagacctgccgtgagatcgtacaaggcgacaagacgggcgataagcctctctcggagatgctgaaggtatggctgaaggagaagtattgcaagcccgggaatgtctttgtcggtgtcacgcaccgtctggatcgtccggtgagcggggtcgtgattttcgccaagacgagcaaggccctctctcgcttgaacgagatgtttcgtgtcggtgaggtgcgcaagacgtattgggcgatcgtcaagaaccgtcccccgcaggatgagggtgagttggtggattggctggtgcggaacgagaagcaaaataagagttacgcttacgataccgagcggccgaatgccaagaaagccatcctgcgttataaattgatcgcccattcggataattattatctgttggagatcgatttgaagacggggcggcaccatcagatccgctgtcagttggcgaagatgggatgtccgatcaagggggatctgaaatatggtttcgatcgttccaataaggatgggggcattagcttacacgctcgtagcgcggagtttatccatccggtttcaaaagagaacgtgcgaattgtcgctcccgtgccggatgataatttgtggaaagcgttgtcggttgaccgataataattgatattgataaagatctgatatatgtggaatcctttcggatggagaaaacgtttcattcgaaaggattttgtttttaaagtgtagacttacccagtaggtgtggatttattccccggttggatacaccctaattttagtataaatgttaacataaacgctatacgatttgttattaagtgaagtaatgttaattatcggtctcctcgagaaaaatggaatgattctttctttctttacataacaaatgtgacataagtaatttatataggtagaatgagcaggaaaagattggcaaaagtacaggttatcttgatagcccttgtagtagcgatgacgggttgccgccataaggaagagcagcaattgcccatcgtgatcgtagacaaaccctcaaaagaagacgtgcagatttatggcgagtacgtgggacgtatccgtgccgccagctttgtcgaggtacatgcccgtgtggagggattcctagagaaaatgttgtttgaggaaggtaaacgggtgaagcagaatgagcccctgtttatgattaatcccgataaatatcgtgctagagtagagaaagcgaaagcccaactgaagaaaagccaagcccaagcagccaaggcccggcgtgatgtggaacgcctgaaaccgttgtacgagcaacacgccgccagccagctggatttggataacgccacggctgctctggaagacgccgaggcgaatatcgccatgagcaaggcggatttggatcaagcggagatggagttgagctatacggtagtgacctcgccgctgtccgggtatatcagtgagcgtttcgtggatgtgggtgctttggtgggcccgggtgtcaattcgaaattggcggctgttgtgaaaagtgacacggtattggtcgattttaagatgaccgccttggattacctgcgtgccgagcgtcgtaacgtgaagtttggcgagcaggatacgacccgttcttggcagcctaccgtgacggttaccttggcggacgactcggaatacccggtaaaaggtatcgtggacttcgccgacccgctggtggacccgaagaccggtacgtttggcgttcgtgcggaactatccaacccgaaccagaaattattgcccggacagttcacgaaggtgaagctcctgctggatgtccgcgagcgttcgatcgtcgttccccggaaagccctctcgatcgagaaaggaggtgcattcatctatatcatccgtagggacgatatcgccgagaagcgtttcgtgcagaccggcccggagatcggcaacaaggtcgtgatcgaacggggcttgggcgagaacgagcgagtagtggtagaaggttatcataaattggtgccgggcgtgaaggtacatgcggtagaggccggcgacgagaaggctatccaagcgcttagagaggaggaagaacaatgaaaccgggattctttatagaccgtcctgtcttttcgaccgtcttatcgatactgatcgtgattgtcggaatcatcggactggcattgttgcctgtggaccagtatccgcagattacgccccctgtagtgaagatcagcgccacgtatccgggagcgagcgccttgacggtgtctcaagcggtcgctaccccgatcgagcaggagctgaacggtacgccgggtatgatctatatgcaaagtagtagctcgaactcgggtagcttgaatattacggtgaccttcgatgtatccgccgatgcggacttggcggctgtcgagatccagaaccgtgtgaaactggccgagagccgtttgcccgccgaggtgatccaaaatggtatcacgatcgagaagcaggctcctagccagctgatgaccttgagcttgatgtccgacgatccgaagttcgacgagatttatctgagtaacttcgccacgatcaacgtgttggacgtattgcgccgtatcccgggcgtaggccgtgtatcgaatatcggtagccgttattacggtatgcagatctgggtatatccggatcggttggccaacatgggattgacggtaagtgatttgcaagatgccttgaaagaccagaaccgggagtcggcggcgggcgagctgggtaagcagcccgtgctggatgtggatgtcaccttgcctatcacggccccgggacgtttgtctaccgtgaaggagttcgaggatatcgtggtgcgagcaaacccggatggctcgatcgtccggatgagcgacgtggcccgggtatcgctggaggcttcctcttattctacggagagtgggatcaatgggaagaacgccgctatcttgggtatctatatgttgccgggggcgaacgctctggaggtcgccacgaaggtgaaagaggcgatgaaggatatcagcaagaacttcccggaaggcttggagtataatttcccgttcgatatgacggagtatatctcacaatccgtgcacgaggtgtataagaccttgttcgaggcccttttcttggtcgttctcgtagtgttcctctcgttacagaattggcgtgcggctttgatcccgacgatcgccgtcccgatctccttgatcggtacgttcggtttcatgttgatcttcggtttctcgttgaatatgctaaccttgctgggattgatcttggcgatcggtatcgtggtggacgacgctatcgtggtggtggagaacgtggagcgtatcatggccgaggagcgtgtgactgcccgtgaggctacgcataaggcgatgcgggaattgtctggtgctttgatcgctacctccatggtattggctgccgtgttcgtgccggtgagtttcttggggggtatcacggggcagctgtaccgtcagttctctgttacgatcgtggtttccgtgctgttgtccacggtagtggccttgacgttgagcccggcgatgtgcgccatcatcttgcgtccgtctcataagaagaaagcgtttattttccgtaagatcaatctgtggttggcgaaaggaaataagaaatatacgaagttgttgcgtatctctatcgctaatccccgccgtatcttggcagggttcgggatggtactggtggccatctttgtcttgaaccggatgttgcctaccagctttatcccggaggaggatcaagggttcttcactgtagagctggagatgcccgagggtactaccttggaacgtacacgtgccgtaaccgaccgtgcgatcgagttcctcgaccatcatccggccgtggcctacgtacagaatgtaacgggtagcagtccccgtgtcggtacgaaccaagggcgtgccacgctgacggtgatcttgaaaccgtgggaagagcgtaaatcctccggcatgaaggtagaggacgtgatggccgatgcccgccgggaattctactattaccccgaggctaagtcgtatgtgaaccgtccaccggtaatcccgggtttgggtgagagcggtggcttggagatgcagttggaggctaagggagacgctagctgggataatctggtaagtgccacggatactttcctgtattacgcttcgcaagcgcctgagcttcaaggtgtgtcttccgccatgcagagcgagatcccgcagttgtatttcgacgtggaccgtgatcaggcgaagttcctcggcatcccgttgtctgatatcttctcgaccatgaaggcttatctaggctccgtgtacgtgaacgacttcaatatgttcaaccgtatttaccgtgtatatatccaagcggaggcgccttatcgggccacccgggataatctggatttgttcttcgtccgcagtaaggatggggcgatggttccattgactgccttgggcacgacccaatatacgaccggtccgggaacgatcaagcgtttcaatatgttcaccacggcctcgatcaacgccgtagccgctccgggatatagtacgggtgaggcgatggctgcgatggaacggatcgctagggagcatctgcccgagaatatcggtctggagtggagcggtctttcctatcaagagaaacaggccggtgggcagactggttttgtcttggcgttggtcttcttgtttgtcttcttgttcttggcggctcagtatgagagctggatcgtgccgatcgccgtattgctttccttgccggtagctacgctgggcgcctacttgggcatctgggcgacagggttggagaacgatatttattatcagatcggtctggtaaccttgatcggtttggcggcgaagaacgctatcttgatcgttgagttcgccaaggtacaggtggataacggggtagatgtggtgagagccgctatccatgccgcccagatgcgtttccgcccgatcttgatgacctcgttggccttcgtgttgggtatgcttccgatggtgttagccagcggaccgggctcagcttcccgccatagtatcggtacgggcgtgttcttcggtatgctggtggcgattacggtaggtatcgtgttggttcccttcttctttgttttgatctataagataaagggaaagatgcgtatggaacgtatcgctcaaaagaaagaagtggtaacctctattttaaagagacacaaaaacggaaaattatgatgacaaagaatttctatatagccgctttcgtcgtttctatgctggcgttctcttcctgcaagatcggaaagcggtacgtacgtccggagttgaacctgccggaccggatcgaggcttatacggatacgaccgatacggcatccgtggagaatatcccatgggagagcctttacgccgatgaggccttgaaggatctgatcagaaaggcgctggataataataaggatatgaagatcgccgccgccaaggtgaaggagatgatcgccgccaagcggatctctttcgcgagtatgctgccggaggtgggagcgaatgtctatgcgcaaaaggaacgcttgaattatggaggggataacccaaagcccgatccagaatttggggcgaagctgactttgtcttgggaattagatttatggggcaaccttcgctgggcgaatgaggcagccatcgcttcctatatggagaccgtggaaggacaacgtgccttgcgattgaccatcatcgccgaggttgccgccaattattatcaactttgcgccttggaccaagagttgtcgatcgtacagcaaactttggacgcacgccgtgagggtgttcgcttggcgaagcttcgctatgagggcggacttacttccgagacggcttacaaccaagcccaagtggagttggcccgtaccgagaccttgatcccctcgctggagcgtcagatcaagatcaaggaaagcgacctcagcatgttgttgggcgagtatacggatgatatcccccgtggtctttccttgagcgaccagcacttgccggatgccttaccgatcggcttaccgtcttctttgctggagcgccgaccggacatgcgtcaagcggagtttaagcttcgggcggcgaacgctcaggtaggtgtggcgcaaacggacttattcccgaagatccgtttgacaagtaattacggtttcgagagcgatgagttaagcagcatcttgaagagtccggctggttttatcgccggaagcctgttgcagccgatcttcgccatggggaagaacaaggcgaaagtgaaagcggcgaaggctcgttacgagcaagaggtctatagttatgaaaagagcgtattaggcgctttcaaggaggtgaacaacgctatcgtgaccgtccgcaaggtgaaggagatccgtgcttcccgcatgaatctggaagcctccgccagtaaatatctggaactcgcccaactgcaatacatcaacggtgtcatcagctacatggacgtattggatgcccagcgtggtttgctggacgcccagatcggtttgaacaatgccgtgctggatgagttgctgtcggtggtatacctgtataaggctttagggggagggttttgatagcgcaccctcctcatagaggaaactatctcaatggaatatgccccgtaaatcaatggaatctacttcgtgttccattgatttacggggcatattccatttactttctgattgtgtatccgagtatgtcctatataacgacgagatagccgcacaggtatgcatgaggaggataacccggtgatcatggtggcgaagtataagcgataatgagaaaattctcattatctttgcgctcatataaaatcagagatagaaaatgccattaaatttacaaaagaacttaccggctatcgagctgctgaagaaggaacatatcttcgtgatggattccttgcgtgcgtcggagcaggatatccgcccccttcgggtagtcgtattgaatttgatgccccttaagataacgaccgagacggacttggttcgcctcctcagtaatacacccctgcaagtggaacttgatttcatgaagatcaagggacatacgccgaagaatacgcccatcgagcatatgcaagaattttataaggatttcgatgagatggcggatgatttctacgacgggatgatcgtgacgggcgctcccgtggagcagatgcctttcgaggacgttagttattgggaggagatcacgcagatattcgattgggcccgtacgcacgttacctccacgctctatatctgctgggcggcgcaagcggggctataccatttctatggggtgcctaaatatgatttgccggccaagatgttcggtgtcttccgtcattcgctccgggaaccgtttgttccgatcttccgggggttcgatgacgagttcttcgtgcctcatagccgtcataccgagattcgccgggaggatatcatgaaggtgcccgagctcaccttattgtccgagagcgaggaatccggcgtctatatggcgatggctcgtggcggacgggaattcttcatcaccggccattccgagtattcgccctatacgctgaatgatgagtatatgcgtgatttggggaagggattgcccatcaacaagcctcgtaattattaccggaataacgatccggcgcaaggtccggtggtgcgttggcgggggcacgcgaacctgctgttcaccaattggctgaactactacgtataccaagagaccccgttccgccgggaagatattaaaaaactaggaagcttgtaaatgagaaaagaaccccgttcgatagaactgttatctcccgctaaggatctgatttgcggcagggaggcgattaaccatggtgccgatgccgtgtatatcggtgccccgaagttcggagcccgtgccgctgccggtaatacgctggacgatatacggcagctttgcgattacgcccatctctattcggctcgtatttacgtggccttgaacactatcttgaaagaagaggagctggcagaggccgagcaaatgatctggcagctttacgaggccggggcagatgccttgatcgttcaagacatgggtatcacccagttgaaccttccgcccatccccttgcacgccagtacgcaaacggataaccgtacgccggagaaggtgagattcctgcaagaggtaggtttcacgcaagtcgtattggcgagggagctatcgctgaaccagatacgggagatcgccgagcagacgaccgtacctctggaggtcttcgtgcacggggcgctgtgcgtaagctatagcggccagtgttacctgagcgccgccttgagcggacgaagcgccaaccggggggaatgcgcccagtattgccgcctgccttatagcttgatcgatgcggatgggaaggagatcgtatcgggtaaacatctcctatccttgaaagatatgaaccgaggggaatacttagaggagctgttggatgccggtgtctcttccttgaagatcgagggtcgtttgaaggatgtatcttacgtgaaaaacgtaacggcttggtatcggaagaaactggacgctatcttggctcgtcggccggaataccgtcgtgcctcggccgggcatagcacttacacattccagcctgtggcggagaaaagcttcaaccggggtttcacgcctttcttatggaaggagcgcacgaaggatatcaccagctttgatacgcctaagtccttgggtgaaccggtgggtacggtgaaggaactgaaaggaaactctttcacgatcgccggactgaaacaattgaataacggagacgggcttaccttcttcaacgagaaaggggagttggagggtttccgggtaaaccgtgtggaggcgaaccggatctttacgctggatcgcccggcgatccgtccgaagatacctttgtaccggaatttcgatcaagagtttgataaactgctatccaagccatccgccgagcggaaactctctgtccggatggaatttcaagataacgcctttggcttcacgttaagtatggcggacgagacaggagcccgtatcatgctcaccaagccgttcgagaaagaaccggcccggagggagcaggcggagaatatccgtacccagctctctaagttggggaacacgcctttcgaggcggaggaagttgccgtggcgatgtccgataactggtttgtcccttcttctttattggccgagatgcgtaggctaggggtggagaggcttatctctacccggcggattcgttaccgcagggaagaggctcgtccgtttaagccgtgtgtaggcgagactccggaagcccctttccccgagaagtgtctgacctatttagggaatgtatccaatagcaaggctggtgccttttataaggcgcatggcgtgactgccgtggaagacgctttcgagttgtctccccggaaggatgtccctttgatgttcacgaaacattgcctgcggtacagtatgggatggtgccctacttaccagcagaagaagtctccctataaggagccttacttcctgcgctataaggaaacgctcttgcgtttgcgcttcgactgcaagaattgccagatgttggtctatgcggaggaataaccggctttgtaaccacttaatccgataaataaaacagatatgaaacgacaaattttctcgctgttcctgctcttgctcacgttggtagcttgtggggataagcctttggacccgaataaacccgtatatgtgaaaatcaagacgacgatgggagacgtcaccgtcctgctatacgacgatacgcctcttcaccgggataacttcatcaagctttgccagtcgaacgagtatgagggtatgcttttccaccgtgttatcaaggagtttgtcgtgcaaggtggtgatccggagagtaaagcgcatgagccgggtgccttgtatggggatggcgatggtggttataccgttcccgctgagatattacctaatcattttaataagaaaggcgctttgatcgacgcgaaagagatcgatgccgtgaatccggaacgtgcttccgccggtacgcagttctgttttgtgcaagggaaagtcttggacgacaaggagcttgcggagaaagaggctcgtatcaacgagatccgccgcaactggttgtactataaattccgggatgagctgaaaaagcaagatccttccttggccgccgattccttggagaatgagttacatgcccgtgcgtccatcttggtggaagatacgttggcggtattaggcccggtagtgatcccggccgaacggcgtgagatttataagacaatcggtggcgttccgcatctggatggctcggtaacgatctttggcgaggtagtggaaggcttcgatatcgtagagaagatctccgtggtaaagacggataagaacgatcgtcctttacacgacgtgatgattaaatcgacgaaggttttccagaaataataacaatgcctattataaggaggtaacgatgcccattgtaagctccttataatgggcatcgtaaacactttagaatgggcattgttaaaaccctcggatagcacttgttatacgaggctgatcgctagcttgttatactaaaagtatcatcaatcatatttggctctcgagccattccagatacttctttactccctccgtatcttccgcctcggggctccaaggcgctaggttctccagtgctagcggcgcgaacggcccttgctttatctcataaataaccgatccggattccagtaccagaagcccgtgccatgtccctgccttgatctccgctccataagcgccttcctttggattcagtatcgttttctccgtgatattcccttcctcgtcaaacaagaataccgctaccttcccacgcagcagcaagaagatctcgtctttcgccggatttaaatgccggtgcggacgcaaatacgtaccgggctccatggcattcagtaaccgattgatcggatcatccaatttctcatggaaattatagttcattcgcaggcggggagactgcaaggctttggcctgggtctcgtcgagtaattgttcgttgattatcttcatctctgtatcttattgtatttctgagctacgaatatacgaaatatttattggtcaatgcttgatattccttatctttgcgccttgatgatacatattcttgagtctgaaaattaaatatttatgttatttaattccatagagttccttatattcctgccattggttttctttggttactggtttgttttcaagtctttgcggtggcaaaatctatttgtggtagctgttagttacctgttctacggatggtgggactggcgctttttgctgctgatcctgtttacgtcgttatgcagttacttgagtggagtctatttggagaaatgcgctggcaaccggttggtccaaaagtggataagtgccggtaatattttactgaacctttcgatcttgggcgtatttaagtactttgatttttttaccgagaatttggtaaatgtccttcacctattgggctgggatgccgattacgtgacgttgaatatcttgctccctgtcgggatcagtttttatacgtttcaggctttgagctatacgattgatgtttaccaaggtaaaatcaaggcgactcatgatattgtggcattcttcgcttatatcagtttcttcccccaattagtggcgggcccgatagaacgggctacccatttgttgcctcagtttctccggcctcgtaatttcgattgtgatctggcgttggatggtatacgccagatgctttggggatttttcaagaaagtggtggttgccgataactgcgctttgttcgtgaacggtgtgtttgagaattaccagacgttggatgggagtaccttgtttctgggggctttcttctttacgatacagatttacggggatttttccggatactcggatatagcgatcggctgtgcccggttgtttggcatagaccttatgcagaactttaagtatccttatttctcccgggatatagcggagttttggcggcgttggcatatctctttgacgacttggttccgggattatatctatatacccctagggggaagccgggcagggaaatggaagagcttccggaatacccttgttattttcttggtaagtgggttctggcacggggctaactggacgtttgtggcatggggagcgtatcatgcattgttgtttctgccattgttattgttgggtcaaaataggagatatagagattccgtggcggaaaacagtttcctcccctctgtgaaggaattgacacagatgggagctacgtttttgctggtcttattgggatggattctgttccggtcggaagatatatcccaagcggctgtgtatctcgagcggatgttcaatgtctcgttattctcggctcctcagcttgtgggcttgggattcgggcaactcctgctgaagaaatgtttctttttcacggctcttatgttcgtcgtggaatggatcggccgaaaacaggcgcatgggttgatgatagaggacctgagccttccggttcggtatgttatctatacggtattgctgattatcatctatggtttcgacgccagtaatccacaaggtttcatttattttcaattctgataagtatgagaaggttctttattgctatattccggtatttaggggtggtaggatgtttagggttgcttagttgcctgctgatccgctcttattttcatataagcgtacccagcctcaaaagtgatccggaagtggaggtattgattttgggcgattcccatcctttacattcgatatccgccgatatgctggggaaatcgaggaatgacgctaaatccagtgagaattatttcaatacctatatcgatttatgcttgaaagcgccttaccttccccatttgaaaaccgtgatattggggtttggttaccacacgtttaccgtggccgatgattcctatcaagatgagtttcctgcctatatgtctatttatccccatctaaaggagcgggaggatttgcgacttttggtacaggaggctgtttcgccggtaacccgtaaggaggtcatgtattcgtatgagtttggcgttccgttcaagaattgcgtagctgagattaaaaggaatgtgatcgagcgtattttcacgggggcgaccgggggaacactagacgttattatcgatcgtcattactatgatgataagggtgcttatttattgccatcctcatttcaacaagagatgttggggcgaatcgtagaggaatgtaagaagcgggatctgtctcttattttgtacaatgcccctgtttccacggaatataaggaacgggttccttcgagttatcgagaattgacggattctttggctcgggaatacgtggatgataaaacggtcttttatttgaattatacggctgtaccgttacctgattcttgctatagggacgctgatcatttgaatgaaatcggtatccatagatttaccccgttgttaaaagataccttgacttgtttgggggtaatttcggaatagttttcgtatatttgtagaataaacgatcgaattaaatataccacatgaaaggaaacccgctttatatcctgctttggctattccttattctttgctttgcctgttcgcccggtaaaaaagaaaagaaatatgtcatcggtgtatctcaatgctcgatgacggatatttggcgtcaatccatgatacgtgatatggaagtagaggctttaaatcatccggagatcgagttggtcgtaatggatgctagtcaggataatgatactcagatcagccagataaaaggttttatcaagaaaaaggtggatttgctgattatatcgtcgaatgagaccgagcctgttacgcctgtcgctgttgaggcgtacagggctggtattcccactatcatattggaccggaaaattaatagcgatgaatatacgacgtatattggagcggataattacgagatcggtcgctcgatcggaatgtacatcagctccttgatcaagggggagacaacgattttagagatatggggacggagaggctcttcctccgctacagaaagacatcaaggttttgtcgatgcgatgtctattgatccgaatgtgaaaatccgggagttggatgggtattggtacaggaagaatgcctatgaggaagtcttgaagctggattccatagaggatgtcgatatcgttttcgctcataatgatatgatggccttaggggcccgtgaggcgattgaggagcgagattcgtcgctggtggggcacgtggaatttataggcgtggatggactcttgggaggaggcttaggcgtggaggcggttgcgcagggtaagttggatgcctctttttattatccgacaggtggtggggtggctattaaggtagcatggcagatcttaagcggacaagcttatacgaaaaagtatgcgttaagcaccgctatgatcgataagaccaacgccggtaccctttatttacaatcagaccggttggtagaatatcaacgccagatcgagaaacagcgtgcgaatttgtcgcaattgctctcgaaatataactttctttatagttccttgattattatcttgatattggcgcttttgttgggtggttccgctatttacacggtttatattaatcgtaaagtgcgccagaagaatcatttgttgaatgagagaaatcgtttggtacaacaacagaaagaggaactctcggtagcgaaccagcgtatcgagcaagtcacgacacagaaattgcagttctttacgaatgtatctcacgagataaagactcctttaaccttgattctagggcctctgaacaagatggcgcaagatgccccggcaggcgctttcgcggatgatatccgcatcgttaagaagaatgcggaacgcttgaaacgtgtgatcgaccaattgctggatttccggaagatagagaataataagatgggattgcgggttactaagatggatttggtctttttaatccaagaggtgaaatcttattttaatactctggcccagagtaagcgaattgattataccttcctgcatgaaatggattctctttttgtttgggtggatacggacaaaatggagaagatattaacgaacttgctttcgaacgcttttaagtttaccccggagcaggggaagattacgattcgtttgcgggaggaggagacggaggttgtcttatcggtggaagataatggagagggtattcccccggaaaacctagcctccgtattcgagcgcttttttacaagcgggcaaagctatgctccgggaacgggtatcggactgcatctgacacgggaatttgtccttatgcataaaggctcgatccacgtggaaagcgagcaaggcgaacggacagtgtttaccgttcagatcccgaaaggtaaatctcattttgatgaatcttgtgtctttctgtcgaatgcgacagaatcgtcctctggtgtagcgcatttggatatatcccaagttcaagaaacgttgaataagaaatatgattatatgatcttgatcgttgaggatgattgggatattcgcgcttatttacagcatgagttgtccgggaattttaatgtacttgtagcggagaatggtgccaaggccttggatattctattgaaggaaaatgtatcactggtcgtcagtgacgtgatgatgccggagatgaatggcttcgagctttgccgccgggttaagtcggatatggccctcagtcatatcccggtaatcttgcttacggctctttcggatgacagtcaacgcttgtatggatttgaggggggagcggatgaatatatccagaaaccgttcaatatcgagatcgtgaaattacgtatcattaaattgttggaagaacgtaatcgtttgcgagaggttttcttgaaagagtctcaatcgcctgcgggactttccatcgagacaaaagggaaggtagagagtctggatgatttgtttatgcgtaagtttatcgctttgatagaggagaattatagcgatcccgatttcagtatagagaaaggcagtgagaaactgggcctgtctcgtgtgcatttatatcgaaaggtgaaggagttgtccgggattacccctacggactttttgcgtaactatcgtttgaaaaaggcatccgccctattgaagcagcgatccggaacgattagcgaggttgcttatgccacgggattcggctcgccggcctatttctccaaatgctttaaagcggtttataatataacgccaaccgagtttatagagtctttgtaaggatgctgcttgtacagatgttacatacgggtaacgtctgttattgtcccttgaaaataaatcttttatgtaacttgtgtgatttatcttgtagctatagttatcgttgtatttataacgatgatatacttttgcggtgtcgataagtacgaaagttgtttttaatagaaagaccatggaacaggtgactgaatcaagacgtaaaccaattgtcgttgggattggagaattattatgggatatgcttccttccgggaaaaaggctgggggggccccgattaattttgtctatcatgcgtcttgcctaggtgctgagggatatgctatcagcgctgtcggagatgatgagttgggtaaagagatcgttgatgagttggataagaatcatatccagcatttgatcgagaaagtgccttacccgacgggaaccgttcaggtagagttacgagaaggtatccctacttatacgattcatgagcgagtggcttgggatcatatatcgcctacatccgatgcgattgatttggcggagaaagcggacgctatttgtttcggtacattagcccagcgttcccgtcagtcccgggagacgatacaagcgatctcgtcgtttgcgccgaaagacgcttatcgtttgctggatatcaatcttcgccagcgatactatgataaggagttgatcgaggagtctttgtacttagcgaatgtgttgaaggtgaatgatgaggagtttaacgttcttcgggacttattcggcttgaatggaactgagagggaagtggctttatggtttattgagaaatacggccttcggatgtttgtcttgactgcggggagctcccatagtacgatttatacgagagaggagatctctacgttgcccacgccggaggtcacggtggcggatacggtcggggcgggggatgctttttcgggggctctaatcatttcgctcttaaaggggaagtccttaagcgaggcccatcatttcgctgtaaagacagcggctttcgtttgtacgaaagaaggtgcgtggccggtttatgaagagtaattcgtttatatcatatgtgtttagatgttttgagtttatacaatttcgaataggtattacgtttttaaggtaaaaaggttgttaggatataagaagagaaaggcaaaaagaaaaagatggtttttgttttaggttaagttagattagattggtgaaaagtggctcggctgttgaagtcgggctatttttatgtccttatgtttccttcaaatagaatggtctcgataacctgcaagattcttcttacaggctaacgagaccttccgcttttatcttttctgatagcttacaattaataagctctctccaataaccaagcatcttggaagttaggagcgtatttcgccttgatggcgtcacggctatcggcggcgtccgctttattgtcgaagctagcgacgatcacacgcaacatcccttgctcgttctcgcccaacactgcgttgtaaccatcattctgcatacgttcttttaatgcgtaagcgtttgtcttgttcttgaaactaccgacaacgacgctataacgtttcagacggctggcgtcctcaccttgagcggcgttgattttttccgtacgagtggtagccgtagaggttctgggttttgagacaggagcgacctcaacaacttcttcctcttgttctacaacctcaacaggagctgtcgactctttttctttggcctgttcgtaagcagccttgtacgcgctctgtttaggtttacatgagccgagtgctaataccatacatacagcggctccaaataaccaaatcttattcatactgttcagttcttataattagtaacgcgaagatataaattatatttagtactttcgcactcaaattgtaatatattataacggcatgaataaatctatcggaacaatgattatggcaacatccctactgttaggtgcttgcaatccggctacggatgtgaacgtgaaggagaccggcgataagaaccttatcgggaagtcggacatccggatcaaagacggccgcatgaccccggaggctttgtgggccatgggacgtatcggcggtatgaacgtatctccggacgggaaaagagtggtgtatacggtggcgtactatagtgtaccggaaaacaagagcaaccgtgaggtcttcgtgatgaacgcggacggatcggataataagcaaatcacgaaaaccggattcgctgagaacgaggccgtatggatcaaaggaggaaccaagatcgctttcttatgtaacgagagcggtagcagccagctttgggaaatgaatccggatgggacggaccgtaagcgactttccgattatgacaaggatatcgagggtttcgctttctctcccgatgagaaaaaggtcttgtttatctcgcaagtgaaaaccgtgaacagtaccgctgataaatatccggatttggataaggcgacaggtgttatcattacggatttaatgtacaagcattgggatgagtgggtgactaccgttccgcatccttttgtcgccgatttcgatggcgaatcgatcagcaatcctgtggatgtgatggagggcgagttgtttgagagcccgatgaagccgtttggcggtatcgagcaattggcttggaacactacctcggacaagattgcctataccagccgcaaaaagacgggtaaagaatatgcgatctccacgaattcggatatttatgtatatgatctgaatacgaagcaaacgaccaatataacggaagagaacaagggatatgatacgaatcccacctattctccggacggaaagagcatcgcttggttaagtatggaacgggatggttacgaggcggatcaaaatcgcttgatggtaatgaatctggagacgggtgagaaaacattcgtaagcaaggattttgactccaacgtggactcttattgctggagcgctgattgcgagcgtatctatttcacgggcgtttggcatggcgagtcgcaggtttatcagatagacttggcgaatggcaataagattaccccgctgaccgaaggtatgtacgattacgcctctgtcgctcttctgggcgataagctgatcgctcaacgtcattccatgagcatgggagacgagatctattcgatcgatttgacaggggatcatacggtaactcaacttacgttcgagaacaagcatatttacgaccagcttacgatgggtaaggtggaggagcgttggatgaagacgacagatggcaagcagatgctaacgtgggttatctatccgcctcagttcgatccgaataagaagtatcctaccttgttgttctgtgagggtggcccgcaaagccctgttagccagttctggtcttaccgctggaatttccagatcatggcggctaatgattatattatcgtggcaccgaaccgtcgggggcttcccggatttggcttggaatggaatgaggctgtcagtggcgattatggcggacaatgcatgaaagactatttcaccgctattgacgaggtagccaaggaaccgtatgtaaataaggatcgcttggggtgtgtaggcgccagcttcggtggattctccgtatattggttggcaggtcatcatgataaacgtttcaaggcgtttatcgcccacgatggtatctttaatatggaaatgcagtatctggaaacggaagagatgtggttcgccaattgggatatgggtggagcgtactgggaaaagcaaaacgctacggctcagcgtacattcgcgaactccccgcataagttcgtggacaaatgggatacgcctatcctttgtatccatggagagaaggattaccggatcttggctaatcaaggaatggcagcgtttaacgccgcggttcttcggggtgtaccggccgagttgctgatttatccggatgagaaccattgggtattgaagccccagaatggcgttctatggcaacgcacattctttgagtggttggatatgtggttgaagaaataaaatttgaaggccgtccccaaagtatatagctttgatggacggccttcttttctcaacgcaataacaaactaagcgatagtaatatccttatccaaataaatatcttgaattgaatgaagtaactccacgccgtctttcatcggacgttggaacgcctttcttccgctaatcagccccatgccacccgcacgtttgtttatgacagcagtgacgacagcgtctttaagatctgaggcgccatgagattccccgccggagttgataagcccgacacgtcccatataattattggctacttggtaacggcagaggtcgatcggatgttctgtcgttaactctgtgtacatcttttgatcgatcttcccgaaattgatagcggtgaaacctccgttgttctccggtagcttctgcttgatgatatcggccttgatcgtgacaccaaggtgattagcctgtccggtcaaatcggctgccgcggaatagtcgatgccatcctttttaaaagagctgtttcgtaaatagcaccataatacggtcgccatacctagttcatgggcatactcgaatgcgtcggcaatctcgactagctgacgtcggctttgctctgatccgaaatagatcgtggcccctacagctacggcgcccatattccatgcttccttcaccgtaccgaatacgatttgattgtaagaattcggataagtaagaagctcattatgatttagttttaccaagaatggaatcttatgagcatattttcgtgcgactgaccctagtatgccgaacgtagaagcgactgcgttgcaaccaccctcgatcgctaattttacgatattctccggatcgaaataaatggggtttggagcgaaggaagaccctgcggtatgctcgatatcttgatctaccgggaggatagaaacatatccggtgttagctaatcttccgtgccccaacaaggtttgcagactattgagagtctgtatgtttctatctgaattgccccacacatcgtccacgcaagtgggtgatggaagatgaagcagcgatttatcaatagtcttacatacgtgatttaaataataatcacttttgtctcctaataaactaataatctttgatgtatccatataaataaatatttacttagtaaacaatcgctgtcaaaaataagttccatagtttttatcgattaacacatagaattaatctatcgatgaattatggtagtatcggatagtttagttaattttgtgccatacaaccaataaaaattttgcgatatatgaaaaagaaatggatttgcacagtatgtggttatgtacacgaaggtgatgaggctcctgagttctgccctcaatgtaaacaaccgaaaagcaaatttaaggaattagtagagacagaaggtgcgttgcagttcgttgacgaacatgtactaggtgttgctaaaggtgtagacccagtgattttggaaggtctgaacgctcactttatgggagaatgtaccgaagttggtatgtatttggccatgagccgtcaagcagaccgtgagggttatcctgaggtagctgaggcattcaagcgttacgcttgggaagaggctgagcacgctgctaagttcgcagagcttcttggcgacgtagtttgggatacgaggactaacttgaaaaagcgtatggaagctgaggctggcgcatgcgaggacaagaaacgtatcgctacattggctaaacaacagaatttggacgcaatccatgataccgtacatgagatgtgcaaagacgaggcacgtcatggcaaaggatttgaaggtttatataatcgttatttcaagtaatttagaggtattagttatatgttttaaagaggggcgttctgtgaagaatgcccttttttgtatttgataaagtaattttagcctttcaagagaataacgatactatattttatgtatttttgtacacgtcaaccacaaggaaagatgccggagtggtcgaacgggccgcactcgaaatgcggtgagcgggtaaccgctccctgggttcgaatcccagtctttccgcttgattattagctctttgttgtaatgatactgtaggggatttgttcattttagcctccttacatacctattcatacaagctttttttgcatgaatagcataaatgatttacaaatagtttacagtaaaaaattatggcatatttcaaaatttgcgtacgagctaagagaaaagacaatacgtatcctgtttatattcgtgtaacccatcacggacaggtaggatatataaaaacagataaagtctgcaaggctaagtctgttcggaagggtgaggtaatagataattacatcatcaaggatatttctattcttattgacgggtatatgtcccggcttaatcgtgaagatatacaatgttgggatatcagaaagatactggacttcttgaggagggattctagcgcaccttctttttctgaattttgtgaggggtttacctctaagatggataacgaggctctcgaacctatgctttcaagaaatatcataaaattgcaaatcactgataatcatatactatctaaagcgcagagtaaatctaaatctttctgaatatcttttgctattccaaatattgggtgtatatttgggtgtagaatttcaaacgcacccaattatgaatatcaaacgtaacatcatttttgcattggaaagccggaaaaagaacggtgtgccaatcgtagagaacgtacccatccgtatgcgtgtcatatacgcaagccaacgcatcgagtttacaacaggctaccggattgacgtagccaaatgggatgccgacaaacaacgggtaaagaacggatgcaccaacaaactaaaacaaagcgcatccgaaatcaatgcggacttgctgaaatattatgccgagattcaaaacgtgttcaaggagtttgaggtacaggaaaccataccgaccacccaacagctaaaggatgcgttcaacctgcggatgaaagacaccagcgaagagcagcaggaagaaacacaaataagtttttgggaagtattcgatgagtttgtaaaggagtgtggcaatcagaataactggacggcatccacctacgagaaattctcagcagtgaaaaaccacctcaaagagttcaaggaagatgtaacctttgaatacttcaacgagttcggcttgaacgagtatgtaaatttcctgcgtgacaaaaaggatatgaggaacagcaccatcggcaaacagatgggattcctcaaatggtttctgcgctggagcttcaagaaagggcatcatcagaatattgcatacgacactttcaagcccaaattgaaaaccacctctaaaaaggtgatattcctgacttgggacgaattgaacaggctgaaagattatcggataccgaaagacaaacaatatctggaacgtgtcagggatgtttttctgttctgttgcttcacaagcctgcgatattcagatgttcgtaatctgaaaagaagcgatgtgaaacccgaccacatcgaagttaccacagtcaaaacggcagacagcctgataattgaactgaacgaccacagtaaaaccatactcgaaaaatacaaggaagtccattttgaaaaccacatggcactgcctgttatcagcaatcagaagatgaatgattatctgaaagaactgggggaactggctgaaatcaacgagcctgtacgggaaacatattataaaggaaatgaacgtatagatgaagtcaccccgaaatacgcattattaaccacccatgcaggaagaagaacattcatctgtaatgcgctggctctcggtattccggcacaagtcgtgatgaaatggacggggcacagtgactataaagccatgaaaccctatattgacatagcggatgatattaaggcaaatgccatgaacaagtttaaccaactataaaagtatcaatcagtttcatagattatcagctatttgaattatatttgcgacaacaataaacattagaatggaaaataacagagaatatcatataggaagaacggactttgacgcatttgttcatgccgtcggttcggaaatagaacaggcgcaagtccggctgattgccgcagccaatgcgcaaatgctgttccattactggaaaatgggcaactatatcctgtatcatcagaacttgcaaggctggggaagcaaaatcatcaagcaactggcaaaggctatccggttcaattaccccgaaaagaaaggttattcggagcgtaaccttacttatatgtgccaatttgcacggtcatatccgttgaacgtgctacgaagtttcattgatacagacacaaggctgtctgttccaagcatacagaatgttacagatgaagtattgaaactgaacaacggacaatttacgcaggaacttactgcgcaaatacaatccgctgattgtcaatctttagaaattacgcaggaagttcctgcgcaaattcaggatgtggagaaaacagtttctgccatttacaggatggagattagggaaatagaaaaagttttcctgaaatcccctgttgccaaaataaactgggcaagccaaatggtcatacttaacggttcgttaccgttaggcataggatattggtatatgaaacaggctgtagaaatgggctggagtagcaatgtgctgaaaatgcaaattgaaaacaacctatataacagacaaatcaacaacaacaaggtaaacaatttcacagccacacttccagcaccacaaagcgaccttgccaattacctattgaaagacccgtacatcttcgatttggctggagcgaaagaaaaggcagacgaaagggacatagaagagcagctggtaaagcacgttacccgttatttgttggaaatgggcaatggttttgcctttgtcgcccggcagaagcattttcaaataggtaacagtgatttctttgccgacttgattctatattctattccgctacacgcatacattgttgtagaactgaaagctactccattcaaaccggagtatgcagggcaactgaatttctacatcaatgtggtggatgacaaactgaggggaaaaaatgacaacaagactatcgggctgttgctgtgcaaaggaaaagatgaggtggtagcacaatacgcattgacaggctacgaccaaccgataggcatcagcgattatcaactgagcaaggctatacccgaaaacttgaaatcagctttgccaagtgtggaagaggtggaagaagaactggcatctttccttgacaaggacaataatccccaaaattgaagtctatggcaggagaaataaacaaactgattccccaatatggagaactcaatagaatatataatgattgggtaaccaattatgctttttcttttgacaagcagaaattcatcaccgacttttacaggcagcacaatgatacaaaggcttttgaagccgctatccttgaactggtacttgacaagcagaaagaacaatacacattgattctcaatagtctgaaaatcgaaatagaaaaaaatatacgggcttatgaaacaaaaccgctgaatgatgacgtcataaagcgtgtgtgttttcactacgcagacaggcataattctgcaattaaagaccagttggagattaccaccaagttgcacgagcctttgaatgacgcataccacagatatgatttcattggttttcgggagcatacggacgaagaagaaatacaggcagaaaaggaatatgaacgctgcaaggctgaatacgacaaggaaaagaaagaattggataaactttatgaactgcaaaagcaagacaggaaagaggcttttcaatatatagaaaacctttccggcaatgtttaccgcctaagtcttctttttatggaagtcctaaaaaagtaccttcctaatgatagggaagaaaaacagcaggatgaaccagtcaagcaaaacgaacaagaagaagtacagaatagcccggagggacaacatgaatattttgacatgaagcagctttcgcccattcatgaaacctgtgtcggggaacagttcgaagccattaccatagcggatttctatgccaatataaacctgtacccctgcaagaataaactaaaaatcaaggcaagggaaaagatacgggtgtgttacctgatattcctgatgagcgagaaactatccaagcaatacagggatgaatggagaagccaaatattaaaattgttggatattgacgagagctattacaggtcgaaatacaaagaacctgtttccgattttccgagtgacagcaaccagaaattcgcaaaggaaatggaaagcatattcggataattcgtgatataacctgacattctacgaaattaccacttttaccactcaaattaatttttgagtggtatttttattgtctgatatttaatgagatagcgcagtatcccatttgtattatccacatccttaccacttacagccatacctaattttgcatcgttcgagaacagaaataacagccagtgcgcagggctgattgtttaacgactaaatagattggacgatgacaaatcttcaagagttattattaaaacccgtctggcagatgacaggcgaagagttcatatttctaagcaagtacgcttccaaccaaacggaagcgcagccacagcccgttacggacacagaaagaaagtatgtgtacggaatacttggcattgccaaattgttcgggtgcagtctgcctaccgccaaccgtataaagaaaagcggaaagatagacaaagccattacgcaaatagggcgcaagattatcgtggatgcggaacttgcccttgaactggctggaaagaaaaccggaggacgaaaataacgggaggtgtacttatggattatatgaaagatataaaagaaatatcggcggaagaagccgtaatcctttggcaagcctcacgcctgagcctgtcgaaaatctatgagaaagcacctgagattctaaaagtgcaaggttcggtcattggtacactgggtaatttcagtgcatcaatcggcaaagccaaaagcaaaaagactttcaatgtgtcggctatcgtggcggcagcattgaagaatggtacagtgctaagatatgtggcggaactacccgaagagaaacggaaaatcctgtatgtggacacggaacaaagtccttatcattgtctgaaagtcatgaaacgtattttacggatggctgggcttccagatgacagggacaatgagcatctggaatttcttgctttgaggaaatacacgcccgaacagcgtatcaggattgtagagcaggctatttacaatacgcctgacatagggcttgtaatcatagacggcatccgtgacatggtatatgacatcaacagccccggtgaatcgacacgcatcatatcaaagctgatgcagtggacggacgacaggcagatacatatccacacgatactccaccaaaacaagggcgatgagaacgcaagggggcatatcggtacggaactgaacaacaaggctgaaactgtccttcttgtggaaaaggacaagagcaatggagatataagcaatgtttcagccatgcacatacgggcaatggacttcgagcctttttcatttcgcatcaatgacaatgccatacctgaactgttggagggttacaagcccgaaaccaagaaaccgggaagaccggaagaggaaaagttcgacccttacaggcatatcaccgaacagcagcaccgcatcgcattggaagcagttttcgggctgaaagaggaatatggctacaaggaactggaggacaccttaattaagacttatgtgtctgtgggggtaaagttgaaccacaaaaaggcggtatcgctcatcaccatgcttcggaacaaacgaatgatagtgcaggagaacggcagaaagtacacgttcatgcccgacttccactattagcccacaccttgcaatcgcttcactttattccgggggtctatatattagggataaagcgaagtggttgcgaaatgtggcaaaaccgcttcactttattaccgtactctatatatacgaaaataaagtgaagtgattatacagaccgtacttcataaagaggtacgggcgaaaagagaaaataaaccaattcaactatcattaaacctatcgtcttatggatatacagacagcgaaacaaatcaaaatagcggattatctgcacagtttaggattttcacccgtcaaacaacagggcataaacctgtggtataagtcaccactaagggaagaaacggaagcatcgttcaaggtaaatacagaacgtaaccaatggtatgattttgcactcggcaaaggtgggaatatcatcgcactggcacaggaactttattgttccgaccatgtgccttacctcttgcaaaaaatcgaagaacagacaccccgtattcgccccgtgtctttttcttttggcaagcaatcatcttccgagccaagttttcaacaactggagattgtaccgctttcttctcctgccctgcttgcttatttgcaggaaaggggaataaacattgcaatggcgaaaagagaatgcagtgaagcgcacttcacccataatggcaaacggtatttcgccatcgcctttcccaatgtgtcgggtgggtatgaaatccgcaaccagtatttcaagggatgcatcgcaccgaaagagatttctcatatcaaacagccgggaacagcgagggaaacatgttatgtgtttgagggatttatggactatctttcatttcttactttgagattggagaattgcccgaaatatcccgaactggacaggcaagattatatggtgttgaactcagtagccaatgtttccaaagcaatctatccgttgggaagctatgagcgcatccactgtttctttgacaatgaccgtgcaggaatggaagccatgcagcaaatctataaggaatacggcagggacttatacatccgtgacgcttcgcagacatacagcggatgcaaggacttgaacgaatacttacagaaacagactgaaagaaacaggcaagttcaatctgcaaaaggggtgcgcagccaaccaccgaaaaagaaaaacggctttcggttatagcccactataactacacgcttcgctttcgtagttgtgggctctcccgaggggattagggctttgccctaatgacccactcagggcgtttctcccctaagaaccccgagcaaagagtgcccctctctttgcaatctccgcttatgggttgcacccctaagaaccctgtgcggttatgagcggacaacagaagatttcatcaacaatccaaatcaaattttaagaatatggcaacaaaatcaagcatacatatcaaaccctgcagagtgacatcaagcggggctcataaccggagaactgccgagtacatgcgcaatatcggcgagtccagaatctacattgtacccgaactgacttccaataacgagcagtggataaacccgggcttcggcagtcctgacctgcaggcgcactatgacagcatcaaacggatggtcaaggaaaagaccggacgagcgatgcaggaaaaggagcgtgagcgcaagggaaagaatggaaagattataaaagtggctggatgttctccaatccgtgagggagtattgctcatcagaccagatacaacactggcagatgtacgaaagtttggtgaggagtgccagagacgctggggtattacaccgctccaaatcttcctgcataaggacgagggacactggcttagtggacaacccaaaaccggggatagggagagtttccaagtcggtgaaaagtggtttaagccgaattatcatgcccatatcgtattcgactggatgaaccacgacacgggcaagagccaaaagctcaatgatgacgatatgatggaaatgcagactttggcatctgacatcctctccatgcaacgtgggcaatctaaatccgagaccggaaaggaacatttggaacgaaatgatttcatcattgaaaagcagagagccgaactgcaacgcatggatgctgcaaaacggcacaaagaagaacagataggtcttgctgaacaggaactgaaacaggtgaaatcagaaatacgcactgacaagctaaagaaaacagccaccaatgcagccaccgccatagcaagcggagttggttctcttttcggaagtggaaagatgaaagagctggagcgaactaatgaagatttgcaccaagagattgccaaacgagacaaaggtattgacaccctcaaaatccaaatgcaggaaatgcaagagcgacatggcaaacagatacgcaatcttcagagcatacacaaccaagaacttgaagccaaagacagggaaatatcacgattgaacactctgcttgaaaaggcattcaagtggtttccgatgcttagagaaatgttgagaatggaaaaactctgcgctgtcattggatttaccaaagatatgatagattgtcttttgacaaggaaagaagctatccaatgtaatggcaagatttattccgaggaacatagaagaaagtttgaaatcaaaaacaacatcttcaaggtggagaagaatccgaccgatgatagcaaacttgtactgaccataaacaggcaaccgataagcgaatggttcaaagagcaatgggagaaacttcggcaaggtttgcgacaaccaacggaagaaccaagaaaaagtagaggattcaagttataatagaaaaaaaagacaatataaaagcactctgatagttacgaagtgcttttatattgtataaattatataatgtttaccattgaagcttcaaagtaaacgcaacttaaggaattgccgaattttgtattaataaagaatatacgacctctgatatatgcgcaacatattgtgatgcttgtgattcattacccttgaaatccttaacaaatatcgctaaagtatagcagacattattaggcaggcatatataggcaacatcattgtgagctgcaagaataccattttcattgacataaccagaacccgtcttatgtgcaatagaaaccctttctttatcaagaagcggagcgactattctatctgtacctgtcacacattcttttaatgtattcttaatgaaactttgcttctcaccactgacaatactttcggtaaacaaacggttcatcaacattgcggcaccaagaggagatgtataattaaagtaagccctatcgtggtcagccgacatttcctcttctgtataagctatctgaaaacttgaacgaggaataagtgtggctataaaactgtcagtttgagcaacattgaccatatctttaaacatcagattgcttgcattattatcactttgagcaatagtataacgaagtaaatctctcacggttaatgatataaccaactcggaataatctttcatcataggactccaagtctttgaatcaagtctattcctatctatctttactaaggtatcaagtgaaatccctttgttatcaaaatcattgcaaagagctaatgcctgatgaaccttaaatacactcatcataggatatacactcttatcattaactttaactgtatctgtgttattaataataattgccactccaatttcaccaggacaagctgatactatccgagaaatgctatcagtcaaaacatctgtcaaaggtggatttgtactattattagaagttgatttagagaacaataaaaaaactaaaactatgatacaaactaaagctatacacaaaattacaaggcgttttcttctactttttttcatactacgatttttaaacattatatattatcatgacagaccctgatttattatttactgcaaagatacgaaatcttacggaaaatgaattggttgtttttttcgtttgttctgttttttatcaaattattttccgagcgaatatgattcgtcttaaataaaataaaaacacccaactttatattcttgggtgtaaaattgggtgtttgttttataatttgctgattttcagcgtttattgcggagaacgagggaagagaatccacgtcgataaattataagcttgcgttaaggcgcttggaggaatatatggggaaagacgacattctcttctctgatcttacatcgtctatattcaaggagtggatagattcgatgaaagatagcttgtacaagaaacatggctatccgaagcggatcaagacaatgtttatggctggatgcgagcggtataataattatgataccggcgagatgcttatacggaataacccgtttaggggagtgagggtacctagacctacagttccagagaaaagggcattggacattagaaccgttcgagatttttttgcggtatccgcggagtatggatcaagagctgatcgtgctagggatgtgtgcgagatcgttttttgtcttgccggaattaacaccgctgacctgtattatatggaaaaagagaaccttagagacggaaagatgtgttactgcagacgtaagactactaataggagggatgacaaggcgtatatagagatagccgtaccagataggctatctcatttgcttgagaaatatgctggagaaaaaaggttgtttaacttctgtgagacttatggatcaagtaagaatttcaataaatgtataaacgagggaataagtgatataacaagaaaaaacgaccttcctcatatttctgtctattcgtttcggcatagttgggctacattcgctcaaaacgatttcgatgcaagtttggatttagtaggcttttgccttaaccatgcttcttcccatagggtgacatctgggtatgttaagaccgattttagcgttatcgaccgcttgaatgccaagatacttgattatgtgtttgaagaaaaaaacgaaaaaaagatggaaataatttgcggattaaaaaaatgactctatctttgccgttgaaatagcgagttggattttagacgaaagtttgagatccaactttttgtgtttatatgtgtttggtctcttctttctgtaaacttccataaaacaaagacttaccgggtgccttcaaaaaaacaggcactatgacgatttctatttctaaaacagcgctgctatcaagattgcagcttttggcgaagatcatacccgccaaatcatccacgccgatcctttgtcatttcttgtttgagacgagagaaggccggttattcatcaccggatcgaatagcgagggccggataaccaccagtcttgagtgcatcttcgacgaggagatatctatttgtgtcccgacttccttattagaaggactgaggaacctacccgagcaaccaattgatataatcatcaacaaggatacccgtgagataaggatcaagtaccatggtggaaagtttgaggtggtgggttatgacccatctacctatccgggaaaaagatcgattgaggtcttggactctgtgtcattgagcgcggaggatttattcaatgggatatccaaggtcataaatttggccgggaatgatgatatccgtccggtcctaagctctgtctttattgagacggaaccggagaccgtatgctttgtcggtgcggacgggcatggcatgggattcttgagaaagggcaatgatagacaggttggcaagatctcagttataatcagccgtcctatagcctcggtattgaaggcgatacttccggcttcctccgataacatggaaatgagggtcggtgcggattggtccgatgtcatattcaatgactatgagatatcgttccggaatgtggaggggagatatcctaattggaaagctgtggtacccaaggcgaataagctggaactgcttgttgacaccggacaactgatcggggctattaaaaggacatcggtgttctccaataaggcctcatgccttattgtcttgaggatcattcgtgataagttgaccgtattcgcccaagacatagatttctcgacttccgcggaggaaacgttggaggtcgattttaacgggaatgagttctcgatcgggattaagggatcgttgcttcttgagatactctcatgtatcaatgacgggcgtacgaggctttcctttagcgagcctaaccgtgctatcttgataactccggagaaccaatccgggaacgaggaacttacctatttattaatgcccatgacaatccagtaagttatgaaagagttcaaagatacaatccagaaatatttacaggagagggcggcggaagatcttctgtttgccccgagacttgccaatcctaaaaagagtatagacgagtgttgtcgttatatcttgggagaggcccgtaagcgtggaacctctgtcgtgatgagtgatacggaggtttttggtatggccgtacattattatgatgaagagaatatcgaggtcggaaaagttcctgtcggtagctccgtttcttcttcccataaagtagaacttacggaggaagaaaagaacgctgcccgtcaggcggccatcaaaaggttgaccgaagagcaataccgatcgcttaaaaagaggccggccaagaagaagattgatgagagtgtccaacaaatgagcctgttttgatatgaagccgagaacgagattggaaaagttggtggcgggattgagcgaaaagcttcccgccatcacaaaggcgcaggaggaatgggccaaggaacacgtgttcgaccatgtagcttacaaatgtaagaatgagttgtggtgctctgaatgtggcgagatttgggttaatacgggtaatagtaaattaggtgacaatatcgaatgcccttattgccactatcaattagatgtaaaggtcagcagaaagcagaagaaccatgaggaggcgtatatgtccatcctgcaagtgagaggcgggtttcaggtaatccggcatatactatgttggaaaaacgcccgtaagggaacttccccggtgtattatgattttactgaagttgttcaagaatggattcgtgaagacggaaagcgtacgatcatagcccgtccaataaatatgggacgtaacggatttgcgtatagttcccctcttagtatcaagggtgaatatggaagtaacccatataattattacggtgatttatatgcgatatttggagagctttatccaaggaaagaattacttccggaattgaaaaaacggggactgaatcgactgttcccggatgtaaccccgtctaagttgatacgtgaccttttgaaaggaggtaatgacgcggaactatgcctcaagaccgggcaaatatccatgctgaagcacatgtatagaaacggcttttcccagcttcgttataagccatcattcaatatttgcaaccgtaaccattatattatcaaggatgcgtccctctgggaagactatatgtctttattggcttatttcggtaaagacttgcgtaatgcccattatgtatgtcctaagaacttgaaggtcgcgcacgataggctattggcaaagaaagatgcccgtgaagccaagttgagacaggatagggatcgtgtggaagctatccgtaggcgtgaaaagctcatgaaggatatagccggcttctacgaacggatggaaaagtttttcggaatgaaaatcacggatggtaacatagtcatttgcccgttggagagtattacccagttttatcaagaaggcaaggctatgcatcactgcgtgtataaactcggatattacaatcggccggatcgtttgatactgtcagcaaaggacaccggtggcaaacgtatcgagacgatagaggtgaatttgaagacgctgaatatcgtccagtctcgggccgtttgcaatggcgtaagtgagtttcacgaccagatagtaaaactggtgaagaagaatatgaacctgattcgtcagaaaatgatagcgtaaaaatgccaagaattagaactatagtaccggaattttgggaagatgaaaggttttcgaacgtatctcttccggcttgtctgctttatataggcatgaaaaactttgctgatgatagcggtgtcattttagctaatgagactatcattaagtcgaaagtctttcctgcccgcgaagatattcgtaagcagcaggtttctggatggctgcaagagctgattgaaaactctatccttgtaccttttacattcgagaacaaaagctactacgtgatggacttttccagtgagcgcatcgacaaaccgcaaaagtcgaaaattccggcagaagtgatagaaaacgttctttcgggcaaaaatagaagcaatccgggaacattcgagaatattcccgaacaatcgggaacaatcgagaatcctcctgctggaaaggagagtaaaggagaggattggaaaggagaggagggttatacgcgcataggcacgcgcaactctgaccccgaaccggagaaacccaagaatgagaattttgaaaagttcaagcaatggattgctgcgaatgctcctagtgtggctaaactgaaagagccgtttacggaagaacaattcgaacggataaagcgagattttccgcttcagttaatccaggacactcttgtctcgatgcacaattatcgagagctgctcaaaaaatacgttagtgcgaacctcacgttccgtaaatgggcgaagcgtgatttagaaaaaatgcagtatgaatcaggaacaagcaatacaactcatatcggaaatagatcaaacaaccggcgtacttcctccggaactgatgccgaaaacaagagaatcgagcgtgagcgtttggggcgtcttgccgatgccatattacaacagtctgcggcccaaaacagtaaatgatgtgtttgatagcccaagctgctctatagcggttatgaacaaagaatttggagagacgcatcttcgtggatttatggtaaaagtcttgaatgatttggtagattttttcaatgtagggaaatcgatcggagcagtacaagtcgcacaaacagttgatctgattattgatgaatactatttctttaagcctgatgatttcaagctatgttttaatcgggcgaaaaagggattgtatgggaaggtttatgatcggatagacggggctgttattttagaatggcttggccggtatgagaaagaaaggggttctatggccatggatgatagtatcaataattccaaaagctgggatataccggaaggcgataggacttctaaaacattggaacaagcgtaccatgagtttaggaagtatgattttgaacggaaatataaggtgtaaatatttaaaaacaaggaactataatgcaagaaaataaaatacagaccggtaataccgaacaagttttactatcaaaaaagaactgtcaccgtgcatttaaggtggtgagtatagcaaacccggaacagggtgaatggcttttaaactggagaggtaaaaagttgagtgataatttaatgcgttgcgactatgcgcatactgcagtccgtatttccaacaacgaggaaattgttatttatgacaaagacttaggctcctgggttgttacagagtggaaatacgatgtcaaccttgaagaactttggaaatgcgcttgtgacgctttcagttctacaagtttcagcccggaagaacgagctgctctgtatattcgtgattacgaaaaggaattgaatgccgatcttgaaaatatgccggaaaacgagaaggagcactatattacgaaatacaaagaatgggttcgtactttattttacaaacattctcgcatcatgagtgccatgataacggggccagcacgtttcccttcaagacgaaatgagaagatgaataattattatgacaatgctgtaaatgaatttagagcatggagagaaaaagcactcaaggcgatatctcgtaagatagaagatgcaaaaccgaaagaacaaaaagcagaggaagaatggacgaggcttaaacgctcaatatattcctctgcttctacaattaagggtctcaatgacggtacagaaagaggatataataaagccttgtttgtttccagtatttacagtaaagttgaaacatacgcaaagcgcggtgatgtgataattgtagaaaaggcaattgcctatgttagagagctaaataaacaatcctctatcattactgaacgtcataaattctttaaacttgctgaaatggcgaaagctgtatgcgaagctcaggaagtaaggtcaaataaagaagataccgaaatacttttcgagggtggccggataatcaaaaactattccgaggacagggtgcagatagttttcgacacaaagccgcaaccagacgttatttcaaatctcaaacataacggtttccgctggtcaccccgtttttcagcatggcaacgccaattgacgaataatgcttattatgctgtttctcgtgtagttcctattactgttgaacaattgatgaaaggagaaaacaaatgaacattggtttattggtagttgacagagagaaagccaagcgaggggcatataagaagctatgttataacttcgagtataagtttggctccaatattccccattgtgcgttaaaatctggggtatgtgatgagaattgcgagtacatgaaagctttaaaaacttaaataggtatgaatatcgatactgaattttatgtaggagatagtgtatgctatctgagtggggataacattgtccattcaacaataagcaaaataatcattgaaatatcctatactgatgatagttttcttatggtttataagctgtcagatggacttagtgtacccagaaacaattatcccaaatgggataaaagactttttagagacaaagagagtttgataaaatatttatctgattcataactaaaaataagtgagctaaaaagagaaaagcagaccaaaggcctgcttctataatggttgaatgaatattccgatggggggaatcgaacccccgtcttctctgtggagacgctttaacctctaagctacaaagggcagtaacactctttttcaagatccacagctctttactaaagaggaaataggcaaagcctacactaattcaggtgttttgataacccccgcacgaattagtaatgcaaatgtaacaaataataattaaaaacaatgataatagcatggttttcttgcggagcaacgtccgcagtcgcttgtaaaatagcgttgagcttgtacaatgatgtgcaagtttattatatagagactggctccgggcatcccgataatcttcgtttccaggctgattgtgaacgctggtacggtcaaccgatacatactattcgtagtgataagtatagttgtgtggccgatgtgcttcggaaaggttggatcaacggtgcgcatggtgcagcttgtactcttgaactgaagaagaaagtccgctacaagttagagaaagaacttggcagttgggacggccaggtctggggcttcgacttcgacccgaaagaaataaaccgtgcaattcgactaaagcaacagtatccggaaacaaaaccgttgttcccgcttatagagcggcagataacgaagccggaagcgcttggtatgctttggaaagcagggattaaacaaccggtcatgtattcgatgggatacaacaataataactgcataggttgcgtgaaaggaggaatggggtactggaacaagatacgaaaggactttccggaagtgtttgttcagatggcacagattgagcgtgatgttggtgcaacatgcctcaaagataaaaacggacgtatcttcctggacgagctacctacatggcgcggtgacccagtggaagagattataccggactgtactcttatctgccagattgagtttcaggagataatcgacagacaggtagagcgagttttgaaaggagaaattagtattaacgatgtagcctaacaaggcgaaaaaacttaaaaagaaatgagctgaaatagctcacttcacgaaagatgtgagttaagaaagcccttggtaattcagagggctttctttcagttctttatatcttatatgaaactaagatatgaaaacgcaaaaatgtatagcctgtggtcgggaaacagtttctgtgatcaaaactgaaaaagggtatatctgttataattgttactctgataaaaagaatccacctaaatcaaaacaacatcatgacaacgaagaagctcggattcagtcggagtttttcaataaggttccattattcttcccgaacctaccggatcggctcctttttgcagtcccgaacggtggtagccggcataaaatagaagcggctaatatgaagcgccaaggagttaaacgaggtgtagctgatgtgatccttcagataccgaagaaggggtatgcttccctttgtttggagttcaagacatcgacgggaaaacaatctcccgatcaaaaagaataccaacgccaagttgaaatggcaggtagtaagtatgtgattgttcggagcgtggaacaggctatccgggaattgcaactgtatttgtgttaattgattacccctgttatattttagaataaaagttatgacagaattgaagtatgaccctcggaattatcgcatccacacagataagaataaacggcttattaaaaagagcttggaggactgcggaacgggtcgttctattctattggataagaacgatgttattattgccggaaatggtgtttatgagcaggctttggaacttgggttaaaggttcgggttgtagagtctgacgggaatgaactgatagcgatcaggagaacggatttgtctacagaagatgaaaaaagaaagcttttggctttggctgataaccatacatcggacacttctatgttcgattttgcagccgtagttgaagatttcagtattgacgaacttggtgattgggagttggagcttccatttgatgatatgccgacggatgtggatcgtttttttgagggagcagataaagtagagaataagagaaagacgatggtttgccctcattgcggaaaggaaatagagctatgatcttatatcttgccggttataaaccttgtgccaaacgatggaaccttgacacgaaagatatctatctcttaagttctttttgggagcataaatcgggacattatggtggttatgtctgtcaagagaaacatattcttgatagcggtgcgttttcagccttttccggaaagaataacagttttgattgggatggctatgtcaagaaatatgctgactttgttctgaaaaataacattcaacgcttctttgagctggatatagatgttgttgtagggctggagaaggtcgagtattaccgtaaatatttggaagatcgtacagggcggcggcctattcctgtttggcatgcaagccgggggaaggattattttattcggatgtgtgaagattatccctatgttgcgatcggtacgacctctgcgatggaagagggtaggcggataagaggtaatcccatgatattaaaatggtttatcgatcaagctcactctgtcggtacccgtattcatgggcttggatttacagatacgatatttcttccttttttgaagtttgatagcgttgatagtacgacttggttgtccggttccagatttgggcagatttatttcttcaatggcaagcaaatgatatatcgtaatcctccccaagggatgagggctaagaatcatgatttatcgaatagacacaattttaatgagtggataaaatttcaaaggtatgcggaacgatacttataacaagaaagtccttctgtattcaggaggtatggatagttggttgatagacaaactctggaaaccggatataaggctttatgtcgatatgaatacccgttattcaaaagaggaaatgaagcgtcttccggatgataccatcattgagaggttggatttatcaaagtgggaacgtgaagataagattatccctctcaggaatatgtatttgatcggtattgcgacgaactatggcgatgaaatctgtttgggagcgacagcgggtgaccgtgttcttgataaatcgcctgtatttgccgagttgtatgaggacttactcggctatctctaccaaaaacaacattggacagaaaaacgaacgatcaagataaacttggactataaagcatataccaagactgagttgttgaagcaatatatagctcaaggaggtaatattagtgaagcgtttagttcatcgttcagttgttatgctcctgttgatgggcacgaatgttggaactgtaaaccgtgtttccgtaaatttattgcttttgcgttgaacggatatccgttttccatggatgtaatcggcaggaatatatcttatataaaacatgaaatacttcctttgatcgaatctggcgagtatggccggaaacgggaggaggaagagataagacaggtattaactctttatcgataaaaatcgtatgtatacagtaaggaagcgtctagagatatcggcgtctcatcgtctgagtctctcttatgcgagtaagtgtgagaacttgcatgggcataactggatcgtaatcgtttggtgcaggtctaaacagttgaatccagatggtatggttgtcgactttgcccatgtcaagcgaatgatccaggagaaactagatcataagaacttgaatgaggtattatcgtttaatccgactgcggaaaatatagcgaagtggatctgtgaccagatacctcaatgttttaaggtgatggttcaggaatcagagaataatatagcgtggtatgaagaagataaatgagattttttacagcattcaaggtgaaggctactttactggtacgccagctgtttttgttcgcttctctggatgtaacttgaggtgtccgttctgtgatacggaacacaaagaaggcaagatgttaagtgatgatgagattattgcggaaataaggcgttatccggctttgcatgtcgtattgacaggcggagagccttgtatgcaggttacatatgatttggttgataagatcaaggccactggccgatttgttcagattgagacaaatggaactttggttccacctgtaaatatagactggattacgtgttccccaaaagagggcggtaaaacagtcgtgatcaaccctaatgaactgaaggtagtctataccgggcaggatatgtcgcaatatgataaatattcagcgggagtatattatttgcagccttgttccggccggaatacgaaggaagttattaactatattaaagagcatccgaaatggaagttaagcttacaaacacacaagatattgaatgtgcgataagaacgatcctttcttttataggcgaggatccttgcagggagggattgaggggaacgccggatcgtatcataagaatgtggggagagatctttcgtggatatgatctgtcacaagtgcctaaaataacggtcttcccaaatggcgtggatggcctttcttgtgatagtgttatcgcggattcaggtggattttattcaatgtgtgaacatcatatgatgcctttctttgggaagtattggtttgcttatattcctaatcccaaaggtaagatactgggcatatcgaaagttggtcgtgtcgttgattattgtgcggcacggttacaggtacaagagcgattagcgaaagatatcatcgtgatgctccaagaagcgttaggttcggaatatccgcctttagcgatgggtatcgtattggaaggggaacacttgtgtaagtcgatgcgtggtgtaaagaaagaaggtaaaatgcgttcttctttctattttgataatggaagtttacctgaattgagggcagaattgtcccgattcgttagttttggttaattatgacagagaagaatgaagtaaaaaagaaaagtagggggcgtaaatctgaatatagagaagagtatgcggaacaggctctaaaactttgtctgttaggtgcaacggataaagagatcgctgagttcttctctgtctcagaacaaacgttgaacagctggaaaaagaagtttcctcaatttcttgagtccttaaaaaagggaaaggctgtggcggatgcgaatgtcgcttcgagactttacagccgtgcgattggctacgatgccaaggctacgaagttcgctaccaatgagggccggattacggataaagtagagtatatcgagcattatcctccggatacgacagccgctattttttggttgaagaaccggcagccggctaagtggcgtgataagaaagaggtcgagaaccttgttaagctgggtgatgaattggaatcgatgtcggatgaagaattagaagcaattatccgtggcgaaaaggagtaaaagagacttattaatcaggcaagcaaaggcagctaccatattgcgtaagcgggaggctcggaatgatttctgggcctactgtttatatcatgaccccaagttcttcgctaagcgtctgttcttgaagaaggtggctgatgctttcactcgtgtatatgaatcgtatgtgtcgggtgttattcgccggttggctgtttctatgcctccacgtgcgggaaaatcttacatctcgtctttgttcatatcgtggatgctcggccattttccggaagaatcggtcatgcgtaactgctgttccgatacgctgtataacaagctgtcgtatgacacgcgcgatattgtccgctcttcccggttcaaagagatattcccggatgtgcaattgcgaggggataagcagaacgttcatggttggagtttggacactgcccggcaggtaagttacttcggggctggtgtaggcggtacggtaatcggtttcggtgcgtccatgctcgccatgacggatgacttgtataagagtttggaagatgcgctgtctgataccaacaatgaaaaggtctggtcgtggaagcagggaacgcacgattcccgtatagaggggaactgttgttcgatcgatatcggtacccgctggtctgccactgacgtgctcggccgtatggaggagatgggaaagtatgacgagatcattcgtatcgccgccttggatgagaacgaccgttctttttgtgaggaggtacatacgacagagtattatcacgaattgcgtgaggaaacggacgattccatttggtgtgccgagtatatgcaagatccaatcgaagcaatcgggttgttgttcccgaaatcggagcttaaccgatttaaattggctgatattgagggcaagcaaccggacggtgttatcggagctaccgatgtggctgacgagggagacgatgatttctgtgctccggttgccaaggtattcggtacgaagtatttcattaccgatgttttgtttacgaaggataatgtagagattaccgaaccgaagctggtttccttgatccttgatacccgttgcgacaatatgcgtatcgagagtaacaacggtggtcgtttgttcgccctcaatgtccgtaaggctgtaaaggcaaagaatgaaaaatgtatcattcaggcgaaaccgacaacagccaataaggatacacgtatcttgttgaagtctggttggatcaagaagcattgttatttcttggaagaaagcgagtataagaaaggttcggactacgaccgttttatgaaagcgcttaccggttacaagaaagagggaggcaataagcatgacgacgcacctgacggaatgacgatccttgccgagaatgtagagtttattgggttgtgcaaggctaactctgtacgtcgggtagcaagaggacgataattggcaaaatgaaagtgtttttctgatatttgtgacacgtgttagataaaatcccgatatttttctgccacatacttgcgttttgatatgtgttcttggtttttacatttcaaagtgaacttgtttatactggccgtattgacagcgaaaaactatttgcttttatattttagcataaaacaattatgccaagtataagcgaaatccttgcgaatgaagacttcggacaggtagtcagtacgttatgtgtcgatacgattgaataccgggaaccaagagaatattacagagaataccatggtgaacgtcgtcggcgtaagacttcagtcggttggcgtgaacccaaacgactggcggtctattcggaaacactgaaagataagaatggtgagccgttacgactggaagataagattgtcgatgtggcccgtatcgttaccaatttcccgaagaaagaagtgcggacctccgttgctttcctttttggtggtagtatgacaattactggaacggaacagaatgacggattccaagagttcaaacgtgtatgggaacgccgattgaaaatgcaatccgtcttgaagtcgttcgcccgtaaggtgctttctgaaagtaaggctgctcttgtattctatccgtatacttccaaaggattagacggcaaattgattacggaattgaaggttaagacgctttctgttcctcgtaatgcaaataccttttctgagttttatcctcattttgatgataacgacgatttggatgcttttattcatcgttaccagataaattctaacggcatgctccggaatagttgtactatctggacagccgataagattataatagctaccgatgagatgggtggctgggtaataaaagaggttcccaatctattcggaaagattccggtcgtgtatgcagatgttttccaaccggaatgggacgaggttgccggtatcatggatgcgcgggaaatgcgtttatcccgtatggccgacactaacgactactttgcggaaccaatcttgaaaacgtatggcgattccgatttaccttctaaggaaacaaccgggaaagaccttaatttccccattaaggtcgatgaagtatccggcaaggaatatcatggcgatgccgattatttgacatggactggctcccagccatctgtagataaagaattggaagaaacgaaaaacgaacaatttgctggtacatctacgccggatctttcttttgataacttgaaaggcattggcaacctgtccggtgtcgctcgtaaattcatgctgatggatgcaactatcaaggcgagtgagaacatggaaacattcggtccggtggttcagcgttgcgtgtcggtcgtgttggccggaatatgcaatattaccaacatcaagtatcgtccccagctggtaaacaacctgatcgatgtggaatttggttccattttgccggaagatttggctgaaaccttgcaaacactctctgttgccaatggaggcaaaccgattaacgctcagcgcacggttacggctcattctccgctaacagaagacttggacgaagaaatgaagctgatggaggaagaggaagatacagcagcgcaacgcaataatatgatcggcttaacaatgggatatggagaatgaaagaactatcatttcatgagcgacaattcctgcaatgtctgttccggcaacaaggtagcataaaatattcgtttgacgagtttgtccgtaggataggacctcttttggctaaatggtcggattatggaggtgaccgtgtatggataggcaacgctaccatagagaagcaaatcgaacgtctgttggatgacctgcatacgcagctcgtaagcaatatatccaatacagttaccgatgtatggaatttaggcaataggaaagcggatgaactggtaacaggttatatcaaggatatggccatatccagtacgttgaaggataagatgttttccagaagtgcagatgcgctgaataccctgttgaaacgtaaggatgaatttggtaaaaccatatcctcccgtgtctgggatataacggacggagctatggataatctggagtattatctttcttcgggtttgtcttccggccgtccggctgcgttgatcagccaagatatacggcaattactaaacgaacccaaccgtcgtttccgccgtgtaagggacgcgaatggcaaattggtcccatcccagccgatgaaagattatcatccggggcagggtgtttatcgctcgtcttataaaaatgcccttcgactagcagcaacgaaaacaaacgaggcttttcgaactgccgattatgaacgttggcagaatatggacttcgtgaccggtatagaggtggaacgttcaccatcgaatcacggcctgtgtcctgtgtgtgatgctaaggctggccaatacccgaaggattttaagtttataggatggcacccgttttgtatttgcatatctacgccgattatgatggatcatgaggagttcgctgaatggttgcttcattaaagaaaatgagggcaacggggattctgtagtaaagtggcagtttacagaatacacccgatgccctctaaattgtttactcaattgccacgtaatatctctattatactttcgctttttgtgcctgtagtttcgaatttaacttctctgcctccttttgcatgttctcggaggcgtgcttgatgtagtatagcattccttcggttcttcctatctctcgaccggaattgaaagcggcttgcagttctggagtggagtatttacccatttcggagggttgggccgttggttgttgggtactattatttcccgacaaacaattcttcgatggattacgcatatcttttttagaatgtttgttttgatagaaaataaaaacggtctcacctttcccgttgcgttacaccatcgaggcagtggggtcattaaaccttcacacgggggtatgaaaccgttatatatgctaaacctacgaatataaaatatccgtagtaattaaatttggtagcatatctacctcgatgtatgtaacgcaccacaaagatgagcactaattctgaatcccacaagaaaaaatagaaatacctttgcgttttcatcttgttgtgctatttttgcgttatgtggaaagagaaattaggaaactatttgattgatgtctcgaaatatatctttacaggtgtagtggtagcgtctttattcaaggatatggaagataataagtggctgatttatggcctaggctttacgtcttctattttagccttaatagcaggattggtattaacgaataagaaaaaggaggataagtaatgggagctataattggattcgccgtgataggcataccttgtgccgcatttttgatctattgccttacgccttctggcaaacaatggcttagatccaatcacatgatttgacaagatagattcttataggaataatttagagatgaaagcctgccggttgtccggtgggctttttttatacccggaattttctttctctcccttatattttaaacagaaaactcttatgacaattttagatttaatcaaggcggcatgtaagacaaaaggcgtgccggagaagtatgcggaacgtattcagaaaacgttcaagattgagaaagccgaggggatggaggctttcgtggacctgttcaaggataatattcttccggcaatccaagaagcggagaatgaagctaagactacggctgaaacggccgctgtcgccgcttatgaagctaagcatgggttgaaggatggtaaaccggtagaagatccggataagaacaagaaaacggaagaagagctgttgaaggatcttagcccggaactgaaagcttatctggaaagtatgaggaagagcgtcgatgatatggctaagaaggtgggtgattccattaccaactcggcaaacgaggctaagaaagaaacagtccgtaagcagttgaaagatgctggtcttccggataactggctgggacgtgtggacttggcttcggaaacctctatcgaggatcaaatcaaggcgctttccgaagagtttaccggaatccagcaaaaggcgatcgatgatgccgtggcccgtggtgattacgctcccggttccgtgaatcttccggagcgttccgaggcggattgggcgaagctgatggatcaggatgccgacaagagcgcaaataatcccggtgtggtgaacctgggtattgaataatccaagaaaagtgtaacgttatgtacagaaaaagagaaagagaattccagtatcctcccggaattgaaaagattattgaggatgtgatcggcggtgggacgattgaccgccggaatttgcggaacgctttgttcaatggcaagtcgttggacgaactgcctccgatcgtgatcgtggtgaaagatccggaaacgggattgtatcatgtgttgaaaacagcgttggtttcagaagcggccgctgccgatgctatagcgtataaggtaaccaagaatcatctgtttggtgtgggtgacttcgtgacgattggtggagctttgacaggcgcgtccgataagatcacggctattgataagagtaatgcggagtttgatacgatcacgttggaagcgactatcggtgctgccgcaaaaggtcaggtattggttcaggctaaagacaaacaggctgcgaaagccgccaagttgccttatgatggcgaattggttgtcacgatgaataaagtcgacttgactgtagccaaccagcagtccgggttattggtaagaggtacggtaaacgaatcctgtatgccgttcccggtagataaggacttgaaggtattaatgtcgtttatccgttttgtgtaatccattaaaatcagatatatggaaagaagtttaattaagcaagtgaataaaaagaacatggcggcccgtttgaatacccgtcatgtgaaaccggttgtcttcccgaacttcttcggggtgaaaagaaagacctcgttgaagtgggagactctgaccggtgagaaaggcgctccggtaatggcagacgtgatctctttcgacgcttccgcaccgcagaagacccgtgaggtgatcagcaagctgtccggcgatatcccgaagacagccgtcaagcgtggcatgaacgagagcgattacaacgagtataagcaattggaacgtgacgcgcaaggtgacgcggaccagttggcattgttgaatctggctttcaaggatcaggatttcgtgtataactccgttcgtgcccgtttcgaatggtggtgtatgcagctcatgagccgtgcgggtttccatttgtcggcaaagaacaatggcggtgtcgttacggctgagtttgtcggttgcggtatgccgaagaagaaccagcgtaaatctactacggactggagtaacgctacaacggccaatggattgcaggatattgaggatacggttgtggccgcttctgccgaaggggtgacgatccgttacgttgtaatgcatgtggctgatttctctttgctaaagaaacagaaatccacgttcgacacgttaaaggcatgggttaattcgtcctccaagatattggtgacaaagaatctcatcaacgagtatctggccgagcaggagatcccggtgaagatcattaccgtgaacccggctgtccgtatcgaggatagtgcccatcgtcgtaagacgatcaatccttgggagcgtaagcgtgtatgcttcttggaggatttgaaggtgggtgacattcagcatgggccgatcgccgccgagtcttccgctaccttgcagaaaatcgctctcatggttaagcaggattggatcttggtaaccaaatggtctgagctggaaccgttcaaggaatggacgaaagcggaagcgaacgctattcctgtcgtgaatgatccggatgccatgttcatcatgaaagtggatgggaaggattggaacgcttccgaggataccgagggtacggatgatatcccggcgacattcttgggtgaaaccgtcgaaccggaggatcaaacgattcaggatactgaaaacggagaataacaattatggctaagacgattcgagatacgatactcgcttatcccggtctggctgactgtgaagattttttggataacgtcgttttgccgggacgcggttttgaaggtacagaagatagtaagacgatcgatatccgaaaacaaaagctggtggccgccgacctttattccatggtcggcggtctgccggacttcacggaaaacaagctctctatcacgtatccccgtgcatggtatgacgctacggcgaaacgactataccgggagggaggagaacctgagaaagcggaattgataggcaataagatcgaggtacccaaaggaagggcgagaaacagatggtaaagcgatattcacatactgcgatagtgacgattcaatcctgtcaattggtcaaaggggaatgggttgccggtaaactgacggaaatagaggtcactgggcaatactacccgtccaatagtggacagcagttgaagtggaacgtcgatggaagagagttcatcgtgcatggtgagttttcgaccaaagcccgtcctgtggaaaacgcgaagcatatccggattgacagtatcgctctcgatgtggatatcattagctgggaaccgtttcagactcactctgtaatctatgtgtagtttatggcaaggaaaggtgttttgattccaatgtggagtgatagggaagtagggcgttggttcgattactatgtggatcgggcggaagagcggatatacaagttattgcaacgtgccggggaagagttcgtgaagatcgctcgaaaaaaagggaactatcaggatcataccggtaacctccgtagctcaatcggttatgtgatcgttaaggatggcgatatattgaccgagaactatgagcaatccacggaaggaacggataaacagaccggtatcagggaagcgaaacgtttggtttccgagctgatccctctttataaaaggggctgggtattgattggtgtagccgctatgccttatgccaagtatgtggaagcaatcgaaaatctggatgttatctctgtcgccacggaacatgccgaggattggatcaagaaacagagtcgaacgttatttgataaactcgctgagaaaggatattgaacatggcagatcagtttgatatagtggatatcgtatataatgcggttgagccggcgagtacgggctttatcctgtataaggatcaatccggcgatggcgagaaaagaaatcatatcacgatccgctctctggccttgaatgggaaagattatgtcaacaagggatcgataaatatcaatatcttcgtcaagagaccctcgaaaggcgtatcggatcgacagttgatgatagagaccgtacgaggcgtgaggttcgtgttgcgggatatcaagccgccgttggggatgtattggaaatctcggatcgtctggtctgagcctatgggcgaggccaaggatggcttcgattgtacgaatattagattagaggttataacagaattagattagtgatatggaaagaagtttagcgctggatgtggcgtatttaggagttgcggaacccggggatggcgtggccggtaccgagttcacccaatgcgttgacgtggatacggtgacgttcaatttctcggacgccaaggagcttagttttacgtccatgggacatgaggatccttgggcggtggtgagtcggaaaggagacccttccagtatagagttcactatcccttctcccacgagcgacgagatgaaaatgttttgcgggggaaccgtttccggtgataaatgggaggctcccttgtctacgccctcgatattgaagacgatcaggctacagagcctaccgtaccaaggtaagttcacggaatatgtctttgtcaagtgctctgtgttcgggaagatcagccaagccccggataaggagaattgcgatctcttattggtaaaggccacgatcatgacaccggtatctgcggctggcaaacaagcgtccccgtatagcagggcggtgaaggccgtatcggaagacacggaatgatgttttttgtttaggttgtctagagcctcggtttttgccggggctcttatattttagaggaaaatcatgagcgtaaagcgagcactacagattgagagcgacgtggtgacaagtcggtcagtcgtgattcctttcgagttcaagccggagacgatcccggcgggtaagaacgttggtgatagtatcgttatcaccccgatcacggtaaggaccgggtttaggatacggccgttactcttgcggattgacaaggcggacaaggatgctatcgtggctcataaggatgttacgtttgatagtgtactgtcggagttgatggcgaaatatgacgagttgatctttgagatcgtatgtttgggtatccataacaagaaaggggacatgcccgcttggttccgggaggtactgaaggataattgtacatgggaagacctgtatatccttttgaacgctattctctttcgtctgggttgtaaccctttttctcgtactatcatagctttggaagctgtgagcccgttaagcgaagaggagataatagcccttcaagaaaacaacgagacttgggtaggtcggagccggtgacgcaaagtagcttcatgttccttgtactatgtaacgaggcgttcgggtatacgcatgagcggacattggacagcgatctggcgcttgtcatgtccatgctacgggaacatggttacttggtgaacgaccggaacaaatcactgctcatggacgatgatgaatccggggataatcatggcgagtgggtcgaggtaatcgatttcgatacgggaaaaaagaaaagggttcgaagaatgagcccggtatgatatatattactttgcgtagagaacgtttgtcatagtgattttggttgtaaaaaaaccgacgaaccgtgaggctggtcgttttttgttctctgtaaatgtgtcaagatcttcagagtgtctgctcgataaccagagcggtgtcttctagcgaaaagtaattgggtaacgctccggatggattatgctgtcaatctcaagttccacgatgaatttttttctttttacaaaagaacgaagaaaaagcgacaaggcaaaagaaaatgtcgaaaaagataacttataagtgaatttttaacggttgacagtctcacatgaaaggctatcctatattttaccataaacgcattatgggaatcagaaatagagagggcagtctgtacatggctaccgggatcgacaactccggcttgtacgaaggaaaacgcgaggctatgggaattatcaagactctggcaagcgatatcacctcttttgatatatttggcggtatcggtatcagtgcggcgacggcgtttgcgcaagcggccaagagctcgtatgagtttgagaaggaatttcgcaagaacatgctggaagtggcgaccatttccactcaagtaacggatgatatgaccggtttcatgaatcaggtcatgtccataacccaagagataccgatcaaggctccggaggccgccaaggcgttatatagcattgtttccgccggacatgacggggcggatggcatgaagatcctagaagtttcggctaaagctgccgtgggagggcttacggaaaccgagacggcagctgatgctattacaacgatcctgaatgcttataagatgtctgcggaggaagccggtacggtctcggaccagctttttacaaccgtccggttgggtaagactacatttggcgaattgggagcctccatagcccaagttgctcctattgcggctgcgtatgggattagtatcgaccaagtgttgggtgctgtcgcttcattgaccaagcaaggaacgccgacggcgcaggctatgacacagatccgtgccgctatccaaggaaccgccggagaacttggagacgccgctttccaaggtcgtactttccaagaggcattacaattgatttatgagaaggctggtggttccgcttccaagatgaaggaaatgcttggcacggatgaaggcctggccgctacactggctttgactggaaagaatgcaaaggcggcagcaaatgatttgggagagttgcagggctccttgggtgcgacagaggctgcgtttgagaagatggctgacgccgccgataatcagctcacgttgttggcgaataatgtacaggcttatttgcgcccaatgggagagaggatattgaaagaggtgtcagatatcgccaaggcgtttaatgaggcttttgagaacaatgatatcgaggggacgatatcgagggttgaggcattggtgaaaaatgcggcgggagcgtttctttcttataaaacagctattttgttggttcaagtggcgcaacgatcttatatcaagacatcagctttgagcagactggcgacgattcagcatacgaccgcaaccgcgctgcttacaggtgctttgaaaaaacaggctgtcgcaatgttggccgccggaaaagctgcccttgcgaatccgtatgtcttggccgtggcgggtgttacggcccttgggtatgcgatcttcaagctcgcgacacaggcgacggcatcagagaaggcgttggattcccataacaagagggtcgcagagatgaaggactggatagaaggcatgagatctcaaacggatgaactattgaatgctttgcgcgacgataacaagtccatgttacagaaagtggaggcatacgagaaattacaagccctctatccggatgaactgaaaaatctatccttgcaaaagttcatgttgatggatatgacggaggctaataagatgctttctaaatcgatagatgagcgaaccatggcccaacagcgcgctaccgtaaactccatagaggatgaaattgcaaaaaataaccatcgaatctcccagctagacaagaaaagttggattgataccagcttttcggaggcatttgagttacgtcgtttacgaaaacggaacgagcagttgaagattgagcatgataaagcggttgagatagtcgtacaaggattgaaggctcgtacgaaggcggaggcgttagctagtagccaacaagaggaggaaaaggcgaaaatagctacacctattgataaaaaggaactagaaaagcgaaaaaagcttcaagacgaactcctatccctccgccggcagaaccagcaatccgagatcgatctgatgaaagaaggctccgcaaagaagatcgcccagataaacctagactatgacaatgagatcgccgccatacttaccaaggaaaaagagtggaaagacgctcaaggcggcaaactgactaaggaacagaccgtggagattcgtacagccttggtgaactcatacgtcaaacgggagcgatcgacctctaatgtgaataaggaacaactggaggaagagaaacgtgccatgaacgagtatctgaaagaatacggttcttatcttgataagagagatgctatcacggctctttataacgagaagatagccaaggctacgacggaaggcgagcgtaagtccctttccgaggccatgaaaagggaactgtctgatctcgacatagaggcgagcaagacgacttccgctatcagtcggttgttcggtgacatgaaagacaagaccctctccgagttggaggccatcaaccggaaggggcgtgaagccttggagttcttgaaaagcggtgtctgggatgagagcaagggcaaggatttcggtatcacgaaagagacgtttgaactgtggagtaaatcacccgataaactaaaagatatctcggacgcgctcaaggagaacaaggaagccgcggacaagttgcgcccggcatacgagaaggtcgccaaaggtctgaaaggcgtatttgaggctggtaacgatacgaaaaagctgcgacaggcaattgacgatatagaggaagggcttggcgaaatcatgcggtccgggcaattcctctctgatactttctcgaaactcggggattcgttcggtggtgcgttcggtgagatagccgaaggcttgaatgtggccatggacgcggtcaattccgccatggacggggcgaaagccggtgcgatgttcgggccgatcggtgcgtctgccggtgccgctatcggggtggtcacatcccttgcctcctctatcgccaagatccatgacaagaagaacgagagtcgaatccagcgtttgcaggatcagatcgacacgttggacaagtcgtacgataagctgggcaggtccatcgagaaagcctattccaaggatgcctccaagcttatcgaccagcagaataagctattggaacagcaaaaagtgcttatccaaaaccaaatcaaggaggaggaggacaagaagaaaaccgacaatgaccgcatcaaggagtggcgggaccagatagacgagatcaataacaccatagcggataataaggaggccggcaaggacgccattttcggtagtgacataaaatcggcgatcgacgatttcgccaacgcttacgccgacgcgtgggccgccggggaggacaaggcgcgatcggccaaggatctcgtgaggaagatgataaggaacatggtcacggagtcgatcaaggccgccgcatccgatcccatgaaagagatccgggagaagctgctcgagttctggtccgacgattatatcagcgactgggaacaggattatctggatcggaaggcgcaggagctggccgacgacctcgaccgtaagtttggttgggccgacaaatatttcaataccggtaatgcggtagaggaggacgacgggcgtacggcctcgtccaaaggtgttggttccatctcccaggactccgcggatgttatagacggtaagatgtcgacccaacttatatttttagataggacgttggtgcaagtgacgggtatagccgaccagatgcgcttcatctacgacctccagacaaggggctggaagaacgtggaggcgatcaaggacctgtctgggaaggtgtcggagaacacggccaaggtagcggagatctccggacgtatagaggccctatccgagaagatagaggcgaataccaagtcggcggcctccggtataaagactattaacgacaagggtatattaatgagatcaagataatgatggagacggttaacgacataatcaaatcggccctctcgctcggggcatgcagtggttctaacggggtgacggactggagaagcctcgtgtggctgttcttcagcccgcaggggcgtgagttttgtgcggagaatgatttcccgtcgttagacatgttccgtggcatggccggtcacgtgatgccctacggggtgtacgttgactccggccacgtgtacgtaaccaatcccggcaatattgccgtgataggtgatacggatgcggtgataacgatagacgataacgagcgtgttcacaaggtgatcctcatgcacggcggcaaggctagggttgtggcgagcgattacgccgtgatcctgctggtgaatatcgggggagaggttgagataaacaaggataataccgtggtgatcttatgaggggtgagttatacatagacggcaaggacgcctacaccgatttcggcgtatggatcacggagggaggttacgacggccttctcccgttccccgagctggtggaaccggctaggaacgactggccggacgaggacggcatagagccggacttggaaaagcccaccttgaaaccacgggagctcaacatcacgttcgtccgcagcgtggacggaagatccgccggcgctctcgtcgagcacctatcgaagtccgggtatcacctcttccgtatcccctcgctgggcagggagtggagcttgcgactcatccagagcccggcgtatgaggattgggacacgttggaggccttcacgttacggttcgccgaggatcagcccgtaagacccttgtccgtggtgatcccggagggtagagcgtatgttcctccatccgagtacgagctggacggcgtacccttggatcgatacggcgtgatggtgacggagggccgggacgagatcatgagatccccgaccgtgaagactaacctgtcccgtacggtactggacgttgacggtaggatctacgatgccggcaaggtggtgtataatagcaaggaggtcactcttgaatgctgtctcatcgccggctcaatgacgacattctggagttgttacgacgctctgttggatgccttgatccagccgggcgagcgttcgctgtacgtggattacaacgtggaggaatacccctgctactacaagaggacgtccggctggaagcttgagagcctccgggggcgtgtggtggtgacattcaacctcacgctggagttcacggtgttccggatggatggtatcgattacctgctggctaccgaggccggggaactggtggtcacggaggacggggagtattacatagacttgaacatatatgccgattaagaaaaagaaaatatcagaactcacgctggctgacagccttaccggtctgtacacgatcggttgtaagatcatagacggcatacaaaccagcgtgaaggtgagcctcggaaccatccagacggcttacgagaacatgctcacggagatctccaacgcccgtgccgctaccaaggcggctaatacggcggcctccaacgccaacaccgctaagctgaacgccgaggcggccacgtcaaaggctaatacggccacggcgaacgccatcactgcgacagggaacgccaataccgcaaccggtaaggctaataccgcggctgatctagccaataaagctgcggctaacgctaataccgcccacgatgggctagagaagatcaaggaagataccgagatcgcaattaaaaacgcaaatgacgcggcgaaattggcgaatgagaaagcttcttacgccaacacgcagggtaacttcgccaagacacagggtgaccgcgcgcaagagctggccgaccacccgtggaaggttggcgataacggcaactggtggaaatgggatctggatggggacaggtatgtcgatacgggcatcctcgctaagggaggcgtcttgtacccgaccttcacgatcaaccccgccgacatgacgctggtgatgtcctacgaggacgaggtgtcaccaaaccttgtcaagctcaaccaagagaccggtgagctgtatttgaacgtatgaccaaaaaaaggaaggaggaattataatgagtcagattgtattggggaaggtggcgttcgtcgataagggcgtttatgccacggcgagtacgtacaacaccttcgatttcgtcgtcacggatgatagctgctacctctgtgtcaaggacggaaacaagaaccaccccttgaccgatacggcttggtggaaatgtatcgcccgtggtacgcaggcaacggaagcggccaagaccgcccttgcggaggcgaataaggctatcgaggccacgaggaacgctatctctgctgcgggtttggctaacgctaaagcgttggaggctgggaaacaggctgatttggccggtcgagcatctgatgaggctttggctgccgctgtcgaggctgaggcgatgatttccgagggcaatgcgcagatcgcttccatgaaagcggccgagcaatcgttgatgagtcaagcgcttcttgcccctacccgtatggagctgaaatatgtcaagaggataacgttagggaatacggttgcccagaggatagccgtgagtttatttccggcctatgtccttccgaacgtgatctttcagcaagcgttttattccggggatgccctgtatgtggaccaacatgggaacttgaccgtgcgtaagaccggcacggccacgatccacgttatcccggcgcagaatacctcgctcgcccaaacgatagagatcgaggtcacggccccggttatccgcaaggccggtagcgtgatgagatttttatccggtagccggatacgaaaggtataattgtctaacattttaatatacagaatcatgtcattaacaacagcagaggaggagaaggtacgcgctatcatcacggccttcgataacggcaaaacaatcgaccagctgcccttggccgacacgaaccagccctccaagtatttgatcgagggagtgtccaaggaaacgggcgagtcagtgaggatccctttcgccgacgcggtatcgatcgtgaacaagcacgtcgctatccgtcgctggaaacgtggtcagggcacgccagtcggcgagtcctacggtaatatcgatttcctgcgggatcttccctccgtgatcggtctgggctgctacctcgtgtccgttgaccgtagccggcgtaagcttgacccgacgaaccaccatcgtttcgccgacggcagtcccgccgccttggacggcacgatgggcgattacctgtggtgctggaacgcccactactactcttggtgggtagactccacctattattacgaggccgtgagcccgaccccgatcgagggtcatttgaactattatatcccggccgggggtacgtcggccttgggagccggcgtcatggatcgtacgagcggcacgttggtctccgtcgtcagcgacgatccccgttatcgtggcgggaacaacgacgcgacgagggatgggaagcacaacacgcagctaggcatggttgccacgaacatgaacgccgcggctttcggcacggccgcccgcaagaagggtgagggctgggaatccggctggttcgtcgcgaacagcgtcgtcggttatctttaccgccttatcatgggtacccgtgattgtcagtccgcgttgaacccggtaaaggactccaatggcctatatcagggcggtaccggtaagggggttacggaatggtcttgggatacttggtcaagccataacggtggttatccgattattccgacgagcgtagggatcgagttgggggactcggtcggcgtgagcgactacgccgtgaagggctcggacggtggtaccgtccaccaagcgcacgtcccttgtttcctcggcttgaagaacttctacggccatatcggtctgatcgagcgtggctccttgataaacaagctgtccgacggtagcggagattattatgtcgccccgtccctttactcggctttcaacataaactcgatcgagggtctgataaaggctgcgaaggttcctaagaacgatcccagtggctggaaatatatcactgagctcagtatgcagaatctatgctccgccccgactgtcgcctccggcagctccagcacctattattgcgacggttggtataacgacaacgctatttccggccttcgctgtccgttccgtcgtggtcatgcgagcagcggtgcttatgctggcttagcgtgcctctatggtgacgttgcggtctcggacgctagcgtgagctggtcgtcgcccctctgctattttgcagaggacgtaagccccgtgcccgtgcagtactagcgttcattgtgttcgggtgtccatcgtgtccattagggtgcgaagcgcccgagcacccaaggcacgtaagtgccgcatcttagttctttgacatgttgtttccgttcctgttttatttttcccgccgtaaggcggtcgcacttgaaaaattaaatattacatttgtgccgcctattgattgggcgggttgtcttctctaacgtcctgttccggccttcgctgtccgttccgtcgtggtcatgcgaacaacggtgctaatgctggcttagcgtacctcaatggtaacaatgcggtctcgaacgctaacgtgaactggtcgtcgcccctaggatacgccgctgatttattcagtaagaagaagtggaggagagaccctgtcactggacaaaaaatcaaggctaagggtatagtcccggtaggttgataaaccgacggctcatgacctgatggcgattgcagacactggacactaaaagacacttgggacaccatgaggagaaaaggtgacttttccggggatatagcccggaaagaaaactattacaaggcttttgatcatgccagcaagaacaagcatggcaaaaaggccataacaaagttcgaggcggacttggaaaagaacctttccgatctcctatactcttttgaaaacgggacgttcgtaacctccccgtatcgtttcatgaccgtccatgagccgaaaaaacgtcttatcgggatgctccctttcccggatcatgtccagcattgggcgatgctcaatgaggtggaggattattttacgagatccttctccgcgtatacctacggaggggtgaaaggacgcggtccccacgcctacatgaggatgatccggaaggtcctgagaaaatatccggaacgtaccaccgactatctcctgtgcgatatccaccacttctatccgaccgtcaatcacccggtactgaaaagccagctcaggacacgcatcaaggataatcatttattgcgaaggcttgatgagatcattgacagcgtcgagggggataccggtatgtttcccggcacgaagctggcgcagttcttctcgcttgtctatctttatcttttcgatcacgatttgaagcggtgcttccatgtcggggaatgccctgctttggttgagtactacacgaaaaggtatatcgaggaaagtatcgcaacggccaaaacagaacatgattatgaggagttatccaaagggatccaatatctctcggacaggttcaagggatatctgaaccgtctggatttctgctaccgtctcgccgatgatgtcctgatactgcatgaggacaccgtattcttgcaccttgtcatcgagtggatcggtctttattacgctaacgagcttaggatcggtcttaacccgagatggaagatcgggcacgtgacggacggtgtcgatacggggggatacgtgcatttcccggatcacgtccgtgtccggaaacgtaacaaggtggctctctgccgccagatagctagattgagaaagaagggtttgccggacgaggagataaggaagagggcctcttcccgtataggcttcatccaacacgctgatacgagtaatctattaaataaattaggaatggaaacaccaaggaaaagactgggacaggtgataaggaataaaaaaagtccgtgggaggatctcccggccgaccggaaaatgagattcgaggatatactttatgatacccggataccggaggaccggagaggccccgaggaggacaggctgatcgagttgatcgattataagattgaggatagcaagatcgagagaaacgaggacggcacgccaaagaagtgcctcgccatacgtttccgatggaaaggcgaggagcgttacgctttcaccggttccgccgtcttgattgatcaggcgctcacggacttctctcacgaggacttgccggtggataccgtgataaaggtgctcaccaacaagttcggtaagaaatttttcaggttcacttgacccgtagggatcgctcttggccgatccttctgggtcggctaaaaaacatttaaatatatggagacaagagcgatttacacggagagaaagacattcgtaaaatacgatgacaaccattacctgctatacctgaacgaggaggtcttggagaaccacgttccggagggccacgggggcgaaccggaaccggagccccgcgtggcttacgcctataccggcacgtgcgaggatggcggcacgctgatagaggccgcggatgccacgtacgagcggttcgtgtccgggctcgtacgtgcgagatattccgctgacagggtggaggcgatcaccctcaataaattaggttcggatacggcaaggatggccgagttcgaggcggagtttgcggagctggagcgttacagaagcgattgtaagacgagggtacgtgccttgctgggtatgcccgaaagcgtctcgaacaccctttaaataccgttcgagatgcgtatctacgacaagacgggcgaggtattgcttgacatcccggtggacgatgacagctatcgttaccgggcgatagcgcaagcgaagaaggtggagctgcgttactccctagtggatcacgtggagctgcccaccggggcgtatatcgagtaccagggggaaaggtacacgctgtggtacccttcggatttcaagaaggagggcacgagggtattcgactataccgtcaccttcggcggtaacgaggagatcctgaaaaaatataagtacaagctgttgtccgacaagctgtacaagctcaagttcgtcatgacggccacgccgaggatgttcgtggagctactggtggacaacttgaatctttatgattccggctggacggtcggcacggtgatcgaggccccggagaaactgttgtcgttcaaccatgagaaatgctgggctgtattggggcgtttggccgaggagttcgacacggagttcgagatcgtgggcaaaactatcaacctccgcaaggtggagtattacagggacgctcctctaaagctatcctacggaaaaggtaacggattccttcccggtgtaggtcgtgcgaaccaaggcaacaacctccccgtggagatcctttacgtgcaaggcggcgagcggaatatcgattactcggtctacggtagccagacattgttgcttcccaagtcacaggagctggagtaccaaggccgacggtacaagaccgacaaggacgggatgtatgtcactcgcgcggacaggcccctttcctcttataatgaggacagctacgacgccagcgatatatatccatcccgggtcggcacggtgagcgagaccgacacggagccgggcgaggacacggacgggaacgatgtcacgttctacaacttctatgactcatcggttcccgccaacctcaatttcgaggattgcctgatcgccggccagaccatgacggttatcttccagacaggccgtctggcgggccgtgagttcgatgtaaagtatgtacatgacggccgtaagttcgagatcgtctcgtccgagcaggatggcatgacgctgccgaacgcttccctgtatccggaggtcggcgacaagtacgccgttttcaacatatcccttcccgccgcctacgtgtgcgacaacgccaccaagaccggggcgagctgggacatgttccgggaggcggtacgctacctttacgagcgtgaggagcggcaattcacgttcatcggagagctggacggcatatgggccaagaagaattggttggcgatcggcgccaagctggtacccggcggttatgttgatttcagcgatccccagttccagccggacggtatcctgatccggatcaccggggtgagggatcacattaataggccccacagtccggagcttgagctatccaacacgccggtaggcggtttcctgtccgatgagttgggcaagctggagagcgaggaggtcgttaatgacaagaggtataaggaagcgttacagtttaccaagcgccgttaccgtgacgctatcgaggcgcaagagatgctggaagtggccttcgataattactccaagggcatagacccgatatgggtacgtaccatgtcgctcttggtgggtgatgagtccctgcaattccgtttcgtcaacagcaagaccgctcctgtgaccgtcatgcccgatttcaggtatgatgacaacaccggggtgtttaccgccccagctttgatcttgcagcacatgacgctgggcatcagtgatatcaaggagtcccataagccttccgaataccagtattgggatatgggggcgtatacgagtccctacttgggggattacgggaaactctatctctatgcgaagtgcggcaagagcggtgggaaggggacgttcgagatgtccgggagccctcataagttcgaggaggatgggtactattatttcttgaccggtttattggggagccagtttgacggggcccgttccttcgttaccgtgtacggtttcacggagatactccccggccgggtgacggtggataggattgtctcgacggatggtaatacctatttcatactgaataagggggatggctctggcgagtttcatgggcgtatggtctttaccgccggttcggggctgaaaaaccttgatgagtggccggaattggatcagtctatcaaggaggccaagaaatccgtggaggacctgaactattacgtggacggggcgttcaaggatggtatagtcacggagacggaggccgtagcgatcgagaaatacctgaatacggtcaatgtttccaaggccgaggtcgaggccacttataaaaaattatatgagaatacctatctctccggcccggccaagaccgggcttttgaacgcgaaggtgacattgttcggggcgattgacaacctattgtcctccatcaataccgctatcgttgacggcaaggcgacagaggccgagaaaaaagacgttgacgccaagttcacggccttcaataccgccatgtcctcttttaacacagccgtagaggccgcaaacaaggctattcaagatacgctgaaagggtattcagatacagccatgaaaaaggcgcaggacgctcttagcgaggcggaaaatgccagtaacgctgccaataacgcccaaggatcggctaacgatgcccagagcatggccaatgacaaggcgaaggtgttctaccaatccacggccccgagatcgggaatgcggaagaacgatctttgggtagacggcgtgaatatctatcgctataatggtgaagggtgggttttcgcctccgagtacgactgcacgattaccgagatcaatggcggcctcgtgtccacgggggcgatagcgttcggtaataccgggggcatggccgctagcggtaccgtaaggatatggtccggcgggaactccggggcgaacggggagcctcccgcttccccgacattcaaggtgctcagtgacggcaaggtatatggcagcaactccatcatgtgcatgaaccgtaattacgaggtctcatgcggtttcgccagtgacggtaatagcggtggcgatatctcgaaccttgatccgggatctgtccgtatatgggtcggcagcacttacgagcgaagggatgaagcccctttccgggtcgggctaagcggtttggtggccgctagcggattgatgctctccaagcgacattatatgtataacggggcgttggccatccacaacgacggacaagtcacgctaagatcggtagataccgataatggtggtaaccacctgcgtaatgtcataatgcagacgtatccgaattacgtgaactcggtacttgatctgaccgatatattagactccgctacggcgatgagtgtcccgcctatcttgacattgaggtgtgggcgttccgcttataccaattatccgaggatatggattaactgcgtgcataaggctggttggggttccgctttccgggtcgagtcccggtattttaatgacgatggtgccatggagagaactgtcattaatgtcggctccatgatgacacacgcgcaattgggggcgttaagctcttcgcctgagctatatcctgtttattatgataacaaaacaggttatttatgtatgaaatactaatttaaaaaaataatagatatgaaattgacattgaaagacagggtattaatactcaataacgtgctgccgatgtacgacaatcgcaaaaatatcggcttgaaaatatctatctccggcaaggtccagctattggattcggagcggaaggaagtggttatgacccctgttggtaacggggaatacgagatctcattcaagaccgtggacgccatgacaggggtcaagtcctttgatttcacggacgatgagttatggtacctgaaacagcgggtggattaccttgatcggcaggggatgttctccgccgagacgatcgactcttattccaagatactcgaccagcctttttccggggaggaataccaagatagatggaatgagctaaagggaatagatcctatcgcttaacgggatataagcctttatcgggggcgggcaaataaaagtccccgtatatattaaaagaaaacgagttatgggagttgatttgaatacgatattggcgataatcggtgcgatgggcgggatcgaggggataaaatggggcatccgtgcgtgggcgaaccgtaagactaacgcccgtatagcggacgctcaagctgacgtggaggagttcaaggccctgcgtgagtataacgagttcttgcaaaagcagttgtctgagaaggaggaacggttcgttgagcagaccggacggctccggcaggtgcaggacgagcttttcaccttaaaagagagctactcggacgtgaagatagaactggctttgaagaggtgcgagaaaaagaaatgcggcgatcgtgagccgcagaacggttattaatgagggagggtaaggaatgagaaataacaatttaccccggggattacgtaacaacaaccccgggaacatcagaaggaatagcgatgtcttccaaggcgagaagacaagctcagacaaagagttcaagcaatttaaatcgatggcatacggttacagggcgatcttcaagatcctgtctaactattaccggaactataagctggatacgatccgcaagatgataggaagatgggccccaccgaaagagaaccatacggaaaagtacatccaatttgtatctgactacgcaggaatcccggctgacgatccgatcaatattaacaaccgagaacagatgattcggattgtggcagggatgagccgttttgagaatgggagagaagctgatatgtcagatgttattgcggggtggaatttattatgagaacgggaatgatttgcgggatgctggcgatagccggtatcctcaccctgtccgggtgccggaccaagattcagcctgtcgctatcgagaatcgtatagactcgatctatatagacaagctaataccttaccccatgcctgtagatagcgcctctatccgtgcgttgatggaatgcgatgagaacggcaaggttgttctccggtggttggatatggcgaacacgaagaacgtggaactcatgttcgcattggatagtctcggtaacgtgatcgccaatatgaggattcctagggatacgttatatctgccttcgaaagagatctacgtggatcgtaaggtggaggttccggtagaggtcgagcgaaaactatccaaatgggagcaatttaagatggatgtcggagggtgggctattggtgccatttccggattattattgattggaattggctatgtgatagttcggttgataaagaaacgtagatgaactttgtttgataataaaagtgttactggaatatttgttggtgataatatttttgttatctttgtgatgtcgttaagacaagcgttctatgcatagtgacgatgggctaaaagcccggatagaagaggttgaaaaagacctgttattctatctccgcaagtatcatgagctgacttcgagaagcaaattcatgaaagcggtggttgataaggaaatccgacgattggagcgagagctaaaagaactcggaaagtattattagccagaaaggtgcttcccctcatggccagaggggaagtttccttttttgttgttaaatttaaaagcatggtaagatgaacaaagtgaaacgtttttttgaattgaagaaacagtggaaacaaagtgccgaagctgatcgttcctctattgatcggcagataactgaattgatggatagtatgactggccaggaagtggagcagcttgctgttggtgtacaaaatgattttgacaatgttcatcaggaaatagccgaaatcaaagaacaattgacgatccgggaacgtttggaaccggtgttgccttacctgtctgtctctaagttgtcaaaggattactttaacaaatcttcctcttggttttaccagcgtttgaacggcaataaaatacatgggaaagtctgtcgatttactgataaggagctggaaacgctcgatatggctctgaaagatattagccagcgtctctcatcattacagcttgtatgagttattattttttatacagtaatataatatgagagatgattttacacaaaagaccaaaagtatattagcaaaaagagtcgcatatcattgttcgaatcctgattgtagatgtcatacttgtatgcctggatcaaattcggataaagttatttgtataggtgaagcagcgcatatctcagcagcttcagaaggtggtccgaggtatgatccttctatgacacctgcagaaagaaaacatattgataatgcaatatggctttgtagcaattgtgctactatgattgatcgtgatgaaaaaaagtttccaattttattattaaagcagtggaagaaacttacagaaaattggatgcaggagaaaaatagtatttctaatgtggaaagaagtttgtcaccatttattgatattgattttataaatattgtttatggaaggattcctcatgggtatagttctaaaaatttagaacaaatgcaagatgtttatccttcgacttatgatttcatccagaattggactctatattgggagttttcaatgattttatataataattcagatgtcccatgttataatatttcattgattcctattgtggacaaaggattgaaaataagaactaatatagatagagtaaataatattgatcgtttgggaaatatcacattagatgtaagatacgagatgccttttgaaggaactcatttagaagcagatgatttgttatacaccaaaatacctaaatcattagatgatacacgttatttaataaaatatatagatggcaatcggaaagaaaatgtttctgaatttgaaataaaggagggtgattttttcacaaagaagttgatctaatttgtgatagttggggaggaagaatccctccctgccgttagtaaaacctctaaccttcctaatgcaaaatgcgagtaaaccgtatgaatggaaaatgaaaatcctcatcattgtttactcgcattatgcttttaaggaattagaggtctcgaatatcaaaacagcaacctcccttccttcttatccatcaccgcattgaaacacttttgtaggtctcatacagatctttcctgctttccggccccggacaatcggcgaaagactctccggcgaagaatttccaagcgaagatccgtttggctttttcggataagcctaacttcttatgaaaccttattcaatattgtaggatcatcagcagatttcttcaaaaaatcattattgatgacatacgcatccatcctttcggcaggaaatgggagcaacaatctttcaatgtctgtttttgttaatttcggctctaaccatctttcttcatcctcggttgaaaggattgccggcatgcgatgtttcgtattgtgaatgtaatcggtcaatgtattggcctcggtcgttatgatagaaaatgtactaatcacttctccggtcgatttatccagccataagtcataaacgccagccatcgagaatataggctcatcttttacgtatatgtaataaggtattttcttatttccttcatgtctccattcgaagtagccagtactaggaacgatacaacgcttcttcatgatcggttcccgaaacgagggcttctgaaagatcgtatcagcccgtgcgttcaatgtcatgcgttttatctcatcagcttgcttcttgtccttaacccagaacggaatcaagccccacttgaaactttgaacctccggatctgcggttataatcggatagtctggaaaagtgaatgcgttaaccctgtattgctcttgttcctccagaattttttcagcgatttctaccacgcttagattccgaccataacgagccgcaagttctttcgccttcttggacattgagttatagaagcacatatcatttaatatttatgatgtcagacaatcttgtagtataacaaggggataggagctcttgtttcagtttccacttcctccggccaccttgtaccgctaaagtaagattattcctgttaaatccgctattcaatcggtctaccactttcatgagcttcttttgtctctctctatccacgttatcgaacatgttttgctggatcgcactatcaggaacgatatcgatgataataaccccggcttttttgaaaaaatatcctttcctgtaaatgttccggagggctatcaacgcatagtgcacgatctccggtgtactgttcgttggtaccggtagcttgaccacgcaattctggaagtattgaggcagatcttcccggaagttattcgtgtggatgaataccatgagcacttgagcgcaggatctttgtttgcgaagctttcctgcgcaaatactggcgtaagaggatacggcctcttccagtccctcaatctcggatatcgcctcgccaaatgccctactggtacatatctgtttcttatttggggttaccagctctaggtctatgcatggttccccgttcaattctttccaagtacgttcacctacgactgtcatttgttgacgtacccaagctttaggcatctgggcgaaatcgtatgccgtgcttacaccatataaggcaagccgtttcgtgtatcggtgaccgataccccatacgtctccgatctcagtccgtttgagcgcctcgatccgtttttcttccgtgtcaatgatacacacgcctttataccctttatatttcttcgcaaatttgtttgcgaccttggcgagagtttttgtcggggcgatacccatcgatacgggtatcccggttcccttggagacagttcgtactatctcttctccatattctttcaggtcgtatctctcaaaaccggagaaatccaaaaaacattcgtcgatcgaatacacctcaatgtttggagaataggaggaaagcattgtcattacccggttggacatatccccatacaacgtataattggatgagaacacgccaatgccataccgctcgatctcgttcttgatctgataggctggcactcccatctttatacctaatgctttcgcttcgtttgatcgagcgatcacacaaccgtcattattagacaatacgacaacagggcggttattccaattaggattgaaggcacgctcacacgatgcgtagaaattattgcaatccacgagagcgatcattgtcttttcctcctgtttttcttgatcgtgtaggtgacgatcccccataccatgaattcattatctttggtgaccttgataggcggatatttagcgttggagggtaccagccatgcggcgtccgattccagtcttacccttttcaccgtaaaatccccatcgataaagcaaactgccagatcatcgtccattagttccagcgacttgtcgatcacaagaatatcgccttcctcaataccctcgtccttcatcgagtcaccgacaacacgaccatagaaagtcgaggtgggatgctttatcaattctttattcagatcgatagcgagttccatatagtcctgagccggactgggaaaaccagcgcgaatgccttcatccgcatagggaagaggtagatggctctccgcatctaccttgtatatagtcaagttctttttactcataaaaatgttatctcctcggtgcaaaaataggaaaacaatctgttaagttcattgaatgcgttgttaagattttaattgtcaatgcaatagatttcgtattggatggttggagcgtatgtttttcaaaatcttaaatatcaaatctatgttatctagcatacacaagaaatgataaagcgttaattaatgtctacctttgcgttgtcggtcgggtatcggcatacatagttaaggttaggacgtccgccattctagatattcggtggacgttctttttttgtatatctttacctcaaaaacaatgacgtttgaagaatctgtctccaagtgtgagcaaatcaagagttacgttatcggcctcccgataaaggaaggcaagaggatcacctccctgttcatcggccccacagattgggatcgtatgtgcgattacatgaacatgcagaaccagaaaggccatgagattgcccggatcaagttcgccaatgagagcttttccgtatacggtgtatcggaaaatgaattgtctgacggaactcctcgttgggatatgttgaatttgggtcgctgggaggaggaaatcttaaactgagtataaatgaaatatcggggattgatatggccaagctatcaatccccggcatttaaaatagcaacctcccatccttcttatccatcaccgcattgaaaacacttttataggtctcatacaactccttccggctttccggacccggccaatcggcgaaagactctccggcgaagaatttccaagcgaagatccgtttggctttttcggacaaccctaacaggtcgaccatatcccggatatcctgcatacgttcccggatatactcggtacggtcaatactatcatcgggctcatcaataatgttcagtcttcgccaatccacattctcatctaccgggataggcttgtatttatgccggtagggagacgtgtccgaggtaacgttcagctttatcatttgcaggatataccagtcaagttcggtatatttaccttgcttggcttccataagccgggagaggtgttccagaggcttttgaagtagcatacacattacctcgttcaatacgtcaatagcttcactactcattccggcaagtgagcagtgatacttggcgtaatccagccacctgtcgtaacgtttctcaatatatttattcaatgcctcacttgccatagttgtctttatttgatatatttgttgcatgctgtaatggggtggcgctgtgaggcgctgcctttttatttattctctttgttagtctttatctctcgctataaaaatgttatctttagccttcttttttattcttagcccaatcgataatgtattcaataccagcgttgaatcctttactgaaaccatctttaaactcatgatttgatattccatgatagtaagccgagccgaagcacaaggcgaaaccaatggctatcaataccatccctgttccaaagtatggataagctagggatatatggaatggcttgaactggatcgatattccagacgtgagaatgaatattagcgagatcattccgattattaacaatgatattttaagcatctgaacctcctttgtttacattgtgcgacatattctttaatcttgtttgacttttataatccttacatccataagcggcgagattaatggcgtgcgtacctattccttgtccggagaagcatggataacggatacatcttacgcatttccttcgtggatatttattagcgtcctcccgttctttcaagcggttgatccctatgtattcctctgccatgattattcctcctcctcggtctcgtcgaatatccgggccatcatatcgacgatgtttgtttgtatattgtcctccgctccaagcacggcgttgcttatatgctttttctcctcgatgatcctgtaaagtttctggtcgatggtcttgcggccaagcaggtaatagcaattcacggagtccttttgaccgatacgatgcgcccggctctcggcttggtcgcaatctgcgtatgtccacggtagctcgataaaagcgacattgcttgacgctgtcaacgtgatacccgccgccgcagccttgatggagcagatgatgacgtccgttttgggattccgttggaaagcgtctatggctgcttgcttttgttgcatatcttgccgtccggtgacacacaccgccgagggaaacgcctgtaggagccggtctacgatctcatgcaggttgcagaagaggatgatcttctttccgttctcccgaaaatccttcacgaaatcgatcacctctctcaacttaccccgggccgttatgtccttcaatatgccgattcgtaccatgacctcgcctttcagcgatttttgtaccttctcatcgtcggcctccttgtatcgtctcagataatccaccaagtcacgctcggcgtcttggtattccttgcggttggtgatctcgcaggtcacaatctgccgtaccttgtcgggtaattgagtcagtaccttggatttttccctccggaagaaacaatgcttccagagcatgaaattgagctctttcaagttcgaggccccgtgcggcccagagcaatagcggctcgtgaaatatttccagcctccgagatcattcatccggtccatgatagcgagttggcatataaggtcgttgggcttgtttacgacaggggtaccggtcaacaggatgatccactctttcccggcggtgatacctttgcaaaacttgctttgttgggtagccgttgattttaccttatgggattcgtcaatgatcacgctcttgaacaacttgatcgtattatggaactctacgtctttcagcgtccatttctccgatttgttgattcggcgtacgaaatacttccgtaggctctcgtagttcacgatgaacacatggttcatgcccgtttgccagaagaatggccatgaggttcgtaccgaatcggtcaataccatggctttcttgtccgtgaacttgtgccattcacgttgccagttgatcttgaccgtattggggcagattacgagacaggggaaagcttcagctttgttgatggtagcgatgctctctaatgtcttgccgaggcccatgtcgtccccattgataaaccgttttagttgtaagcctcgtgcgatcccttgcagttgataggggtaaggttgtatctttaggccatgatcctcgtccaactcgggcatgtccggtatttgataggctatgtcctcgtcggtcttagactcgttccctccccagttgacgggttcgaagtgcctcacgtaataggtgagctggtctagctccgccttgcacttattgttggccgggatcatccacgctccggtagacttgtcccaccagcggacgctgacggctgtctttagcttgtcaacgacctgctggcggtacctgtcaaaccttactgcgtagcattgtcccttttccgtgttttgtaaagtgatttgcataacggttgtttttattattggttaggcgaactcgtcgaaggctttcacctcctcggcgatctccttgatctgctcttttttcttccgtccccgtttcttaggcttctcttccttctcgcccgtgatatccgattcctccggggtatcgaaatcgaaggattcttgcttgatgccatatttaccttcgaacagataagcgtccacctcgtagctacatctaccgatggcctctttcaactcggctccgtaaaggtacccgtcgccagactcgtcctcgtatttggtgaatgggacggagaggttaaggatctgcccgctcttcaggagtttttgcgcttggattgatacgccggctgattcatcattaccgcctttgctgtatccggtgacgatgatattctttagcttctcgttcaagtcatcgtcggagggattggcgacattgaccaatgtagcctcgtgcatctcacagattttcactacgtgtggcttaagccggttcaatgcgtacagtagatcggggtggataaactgctccgattcctttaggatgttgttcttgtagtttgcttccacgaacttttccgtgtactccgccgtgagctggttgttcttgatcttcactttctggatctcgtacacgggttgctcttttactaattcttccatgctcttttaaaatttaggattgttataactctgaggcgctaaggccatttcagctttcgccttgctaattatcgtgcgacaccattccaattggtgggtcgcagtccggttcaatctatcacaccagtcgactaggtattgctcatccttgcacaggctgtcgatgatagcgtttacggcctttgaggtcgctccggcccgtgaagcggtttcccgtaatgtgtcgaatacttccgatttctttttcacgttcaggtgatattttgcgtccgctaacagcttcccggttcgggcgatatagacggcaaggtcgtttccacgtaggacagcttcttgtacgtcttcgctcattgtgatattcaggaaggcatctatggcggccagttccttggatatcttgtctgtcggtgtgatattgagattcatgatttttattttaagatataatcgttgccacagttgccgcaatgatatacgttgaatgtatctcccgtatgcgtctgtaatttctttacgagtacggaagctccgcatatagggcatttctttgccagcctgcactttagccagtcgattaggattaaaactagactcttcatactattagcttattagcatccaccaccggaaggctagttcctcgtatttctctttccctttccggtagctcagatcgttccgtctgatgaaagccttgaacactttttggttcttcttggagataccatagatgaaatcttgacggcttccggcgatatccatataccaggcacgggaacgatcccaatcaaagaaatcaatcgcctcgtcaaactgtttctgggaactggcgaaggtagttttcaagtctccgccgaatccgaatgtgggaagccaccagtcccatttgcaacgagtgtcgagcgtatattcaaagttgccgtattggaaacgttgccccttgtttaccatgaaccgttgcgtctccgctttagcaagcacttgcgccaataagggatcgtgtcgggcttccatacggagtgacttgatcatggcttgtgccagttcccaatcttccccggaatacaatacgtcatctaccgtatgtttgtcatatcttacccgttcgggttctgtcagcatcgcatccaccagactcccgaatttgaacgccttctccttatccccgtattgcgtacggggatagaggaggttctttagttctgtcaggtctgagttgctgacctcagaccgttggtaatacgtatcttgcatcttcttccttgagttttaagtattcaatgactgcgaagtcaaattcaaaatcgtaagtgttatccatcagccaccggaaccatttgcggccctcttccgtatcgaggattttttttagattactcggtgtacgcctgtatttcccgaagtttatccatgaggacagatatagctttctcatatcacttggccgttacatcatcgacatatttcacgaatgcggactggattcgctcaccgtccttattggctattttctcgcaataggagatcatcttcttatggatcttctcaagatcctccatgctcatgttgataccctcacgcatgaaccacatctggtatacctgcatgaatccttgtggattggtgacttggatctttttcttgatctttgccttggtaggggtaggagacatactggcggcgctgaaatcgaaggctgcctgtacttccgcagtggctttctctgcctccgccttggctctcgcttcctcttccttgcgcttacgttccagttcggccttttgacgttcttccgcctctttccgtttgcgctcctcttccagccgtgccgcctcgattgcgttggtcttgcgaatttcctcttgctcctccagttgtttccggagggatgggaggcggtcgaccaaggattgtttcagtccctcgatctcgaaagcgtatcgatcggaatattcttttttctttaggatggctatctcgttcttgatcgctttgcgggtctcaccgtccatatagaatgtctgtttgttatccacgacgtttttcacgaaatccgtccatgagaaaccggtgcttgtttgcgtgatctgccggcatacgtccccatacgtggctagggaggcacgattgaaaatcccgttcaaggcgttgatatgcttctcgacgtaggcggcgtacgtggtatcaagcaagaccgttatgtcggcccggtattgggctttctcgttctccgccaactgtttttgccgggcctcttcctcacggcgtttttgctcttccagcttcttggcggcgtatttgttacgctccatctgtagcagataagggatggttcccttggatttggcgtctatggaaccctctagtgtcgtgaaacgtttggatatagccgttagcatttgggttaacggcttccggcggttgttcatgttctctacggtcttctttgacttcgcaaggtattcttgtaccgcagtgtcgatctcgtccgtgccgatacctccatttccctcaatcgtgtccaagagggttttccctgcgttcgtgcaagctgagaccgacgcctcattgcgggcgagaatatccggggctgtctgtaagatgctaatgacttcgttagccttgaaaggtaaattgttattctgtgtatccatgtcgataaaattttgaatgttgatattgaactcttaaaatccggcttcttcatcttcttgtgatatttgggatgttataccagatacgggtaccggttccgcttgcggttgctctccgaatccttgtaaaggattttccgcttggggctggagggcttgcggttgctgtccggcttgattgggctggataacggttgtttcttccagtccgtagtcgatctcttgcggttcctcctgtgtctcgaatgaggagaactgtcccgtgcgtaccttgggatatccgtcgaaagcgtgcttgataagcttgctttccaagaatcccggatcaatacctccttcgctagaggtataaagggcattggccttcccttctttctgccgggtttgcgggttccatttctggttgttcttaaagctgtacgcttccaatcgcttgatatcgccttccatcatccagtgccagtccacggtaccgtcggtgcgtacgatacgtaagaaaccacctatcaccttgttggactttcgggggcatgccgcttggtaggtcacggtctttacgccgtcgatcaacccgggggagaaggtatcgccctcatagcaaaccacgggattatccacgtaacggacttgtccggcacgttgccgcatgactaactcgccatatccggtgatggagagataagcacgtagttcgtagatatcgctaccgttgttatccttatagccggtcttcgtgctacggggaagaatataacagtgcggtcgtcctgtcgggtcaagtgacaggccgttgaccgctatatccaaaaagcatccatagagggataacggtgtgcatttttgcagttccggcttgtcttgtaagatcttccggaagttgaatttctctttctcgtagatttgcgctccttgggcggtaccccagatcgcgttatacatttggatgaacttttgttctaccctgttatcttccgctatcatgagcgggtttagctgattcaactcagctactttgatctgaattagattcgacatgatgttatgtttttaaatgttagttaccaatgtttagctatcatgtaagccattgccgcacatccggacgtcgtgatgatatgcaggaaatgtcctaggcaaatagccacgattccaagtatggcgagcgttccgaaaaggatgtaaaatccccacctcaccgcttgggcgagtttccagtaatctgttttcatacgtcaatgatttattagcaatgcggtttaccgtccgtgaaatagcgagttggatgggtattgtaaacttccttttgcaacgccttgccaaggtgccttgctatgttaatgattcatttaatagtcgtatggatctagggcgcacttatacaggttttccagcctgtactcgattttgcccggtcgcttgtaacgttgtagcctaccttccgagacccatctttccacgttctgtctcccgaaacggaggtgcgcttccttttgtccgataaattcccggatacccgcttgcatccttgtgatttgccaagcaaggtattcgatctcgatctttcgtaaagaaggtatgctttgataggtgttttcggttggcatgattattcgcccttaaatagattcttttcgttcgcgtatcgcatgaactccgccatggagtgtatcgagagtttccgaaaaacgttcttccggtggttctttacggtgtgggacgagatgaaaagcgtttccgcgatctcttcgtctttcattccatagtagcaaagctccatcacccgaagctggctgtctgataatgtgctgttgaacttcggttcacagattttcttaaacccgtcacattctcctcgtagagggcagccgacaaactcgaatttgaaattccagttctcatccacgtctatcatgttatcgtacagcccgaagttgcatttgataaacctacgtacagccaagaaatcccggtagcatttattcccgtcgtaacgggcgtaatacttgcggagtgccgcataagcctccggatagaactcttccaaaatctcaaggaaactttgaatgaaatccgtatcggactctttcagttggcgttccggctgtccctgctctttgatagttacttcgccggagggggtggtatagaattctattgcgcgcataccttatcctcctttgggaataactcacaggcaggaatgccaagttctctttctatcacttcttgggctaacgcatccggttggtagactcccgctacccaacatctgacggccgattcagatcgtttggtaatggtggctatcttttggatgaaagccttcttaggcggcgtgttgtccatggagaagtagatctctctgaatgaacgagcgccaatctcatgaccttgtaggtttaatttttccatttttgcctccttacattattatatatgttctaatttctttacctttgatgttgtattaattattacaagtgcaaatatagatatatttatctacaaacaaaactatatgtagataattttatctatttaacaaattatctatggcaaagcaagaagtaagtcaattaagagatagagtcaaggcttttattttatcaaaaggacttagtgttagagcttttgaggcatctgtagggcttccaaatggttctgtagctcaatattccgattcaacaagcaaggaaacattaaaaaaaatctcagaagtatatactgattttgacatagactatattatttctggtcgtaataaagatgtagatgctaatatctacaatgaccgacaaccaattcttgatattcgtgtttgtgcggggaacggtataggtttagagggggacgagaacaaaataactgaatgggtttccatcccagcatttaaaggatgccgaggaattatggtatttggtgatagtatgtatgataaatataaatcaggcgatatcatatttgttcgtagaatagaaaatcggaatgatatagactatggccaatgctatgtagtcataactcgggaagatcgatatataaagaatctttatgagagctctaaaggggacggttatattacgatggtgtcatataatatggaactgaatccagatggccgtcgtaagttcccggatcgtgatatagccaaagaagaaatcctatttctttataaggtagcagggaagttaagaaggagtcaactttaaatctaaatgatatgggattgtttgatattttcaaaacatctaaaaaacgaaaaaaagatgtgactgcttccatttttaataaaatggaaaaagaaacaaaggatttgcagaaagctggacaagattggagtatgcaaaatcaaagagtaagagaaagtagagtaagcggtatggagttagaaaaattaggagatctatatggcgctatttctgcatacgaaaaaagtatagaagatggaataaaaaatccacagactgttatttataattatgcttattctattgatcgattggctattttgtatcgaaaaacaaaacaaatagataaagaaatttcatttttatccgatatgataaaaaaacatccaagatatgaaatgaaaaataagtggaaagaacgtagagaaaaggcaaaggcactaaaagaaaaacaagatgcgaagaagtaaatttattgattttcaaattgaaatgactaataaaacgagataatctgtatggatatattgaaatttgctaaatgcaattggtggttaataatattagttttaatttgcattgctactgcagggtattttggaaagtatcctacagattataacgcaacatgccaagttcttataactttatttgtcgcttttttttctgttctttcaggcctaaaatatgataatgaaaagcttaaagctaaattgaaggaagagaagaggatggctcagttggatgcaacagcaaaatggatgccaatggctatgagttgtatttcaagattgttaacgatgcagtacgatattggatcagtaaaagaagtttcgataaaagccttatctaatatagctaattcaaacagtcttgattgtactaaaactattgcaaatacagaaattggaaataggaaaaattcttatgatagaatatatgagcaattaaatgatgatatagaggattggaaacgatttgttgaggctaattgtcaagggaatgaatgtttggaggttgatggtttaataaatagtaaacgaagtaaatcataataactccagtaataaataaatgctaaaataggatatttatgaaagaagactataacagatctataaaacttcgctgtataacatgcggtgatgattcttcttttgaacctaatgaagataggacatatataaaatgtactcgttgtggtcgagagtattttggaggttatgatgagcttgttgaattgaaccaagaagccatcaatgatgaattggaaagtctgaaaaatgaagcactgggagatttgaaagctgatataaataaaatgtttagagatgcttttaaaggtaataaatcaattagattgaagtgattttggataacactttagttaatagtgcttttatttttgatttaaaggacaggttttttttagtattatcagtgctgcatgcatttaatagatgcaactcaaaagctatattgttaagttcctcgtggtactgaggtacaatctttatttgcgagccatttagtgcagcttcaagataatctacaggagaagatggttcatatccagtttcagaatatttgaattctaagttatatatcgtttttccattgcattcaattgagtgatgcatttcccctgtcttttcattaaatgatttcgttatatgatattcaattgttttcatagaattgttttttcttaaaatataaaataaaaatggatggtattgtagaaaatatagattggcttataaccttatttacttttattggaggtatttatatgtatgtgaaccatactcgtagattaaataatcaacaaaagaaattgaatgcgcagcaagagcagcttaatgatcagcaaacaaagctgaatgaataccaacttcaaaagagcaaagaagaagaattagaaagaaagcaggcattaatagaggcttatgtttttaagactacggatagaagaggtaattctgcgtggagaatgaagatatataataagggaaaagcgaaagcattaaatataaatttcgaatcggagtcattgaagatggataattctataaatctattgattgctgataatatgttacctattccaagtttacttcctcagggaagtgttgagtttgctgttattttgtgcatagggcacaagctgtcacatagatttaaatttacatgggacgatgagtcaggaacagatcgattacaggaacaggatgtaatatttcaataatataacgtatggaggataaagacaaaatcatcgctactctccggaaacagctcaaagatgctattagccggtgtaatgccttggagcaggaaaatgctctattgtcataccaactagagaagagggagaaggaatgtccggaatcacgttaaggatagacagaggcaagtctcccgcttttaccgagatcatgagtctgcttcaagctttccccggattaaaggaatgcaagaggcattattcggtaaggctaacggaagaggatattttcaggttccggaatgagttggagcggatcatgcgactcttgcctcatttgagcgaaaaggagtggttcgatattcctgcttacgggacggatgaatgggctaactggatgatagacctgcatcaaaaaagacgactataaatgtcgtttttactatgtatttacagtatctgttgtaacgaattgataatcaaattgtattatccgcactcgaaatgcggtgagcgggtaaccgctccctgggttcgaatcccagtctttccgcttgataactatgacttatccacgcagaatactaaatgaagcatatcgatattgcgataatgttttatgaaatttgcgatttccctcatatcgtttcttagtgctactttttgagaggggatatttgtgtcccgtatgatggagtatactttgtcgaagttaaggatattgaaggcgtattccttacaagctatggcggcctcggtagcataacctttatgccagtattccgccctaagcaaataaccgatctccggaacctgttgaccgttgaattcttgataggtgagaccacactgaccgataagctctccgctgcctttctctatcatcccccataagccaaagccatcgttttgatacctccttaattgcttatcaagccattcttgtacctcttttttactgaacgctccttcgtaagcgtacattacaatcggatcttgtaaaagcttacagatatcatcaaaatcatcttgttttaattcccttaataggagtcgctttgtctttagtatcatctctttcatacgatattttttcttgtcttctcaaattgttggatgactagttagaatatatcgctcaaggaataccggagttgatccatcatcaacggcacttccgcctcctcgattcccgctacaagaagatcggggatatcttgattgaactgctcttggaacttcgagaaatcaccggactctttctccacggcttttttataaaaagcaagcgctccctttatattctgtaatgcccattccgtatgtcccgcattcaagaaatcttgggtgttgggttgattatccatgatctttttgtaataattacgggcctgatcgtatttaccggtcaagaaagaacaccaagcgatcggacgccaagccttcgtgcttttattgtccagataatctaccttgaaataatatttcagcgcctcattataattcttgagttcaagatggcagtggccgatacatatttggatcgataaatcatccggattgaaagcctcgtaacgatgatagtatttcaacgcttcttccggttgctttaaggtacggtaacaaccggcgatccggcgaataacccatttactgtccggattgataagatccgcatgtaaataagcctccaaggcgccttgtatatcgccattcatttgtttgcagtaaccgattttctggaataagatatcactttcttgatttgcatcggataagcgattgtagatcgtgagcgcgtcgaggaagtaattcttccggagataatactccgctatagttgtcaaactttcctcatcactgacgtaaggctgcaaaattggcaggttatgaaagtctagcgcagatgtaaatatgtcatcaaaatccagatgtcccggataaagtttgaagaaacgatacaagtcctgtatgtactgtccggatatgatttccagttttccccgtttactgatcaattcctccttcgtttgctgaatcatctcggaggcttggctaccaaattgtcccatcatcatttgacgggcttgatccggcaattgcatcatactgaaatataaggagtatttatcggaattacacatgaatgccgcaagagtcatggaatctagcatgtccttttccgtttgattcttgctcaactgattgccaaaagcggaatgctcggtcgtgaatggcatgaaccagttacccagttcccggaaaaaggggaaatgctttaggtgcacgaaagtagagtgcattacgtccgcgccttcttgttgcagttcgctgaactcctccattttcttccctaaggagctgttcgataacatattctgccactccggattcatctcgtttccgagaagttccggattgatatcctttaagtttatcttttgactgattttagggcctagcttgatcatctccggaatgatctcgtcttgtagcttacgggtgatcttctctgtctcacgggctaggataaaacgaagggtaatcgttcggatcgctttcgtgaaattaggaaatccctcggataaagccgctagtcgatccgctatctgcggatatagcgccgtacgtttcctataggtatagagcgtcaggagaatcccgatcaacgcgcggtaacgaatctcgtcttcttggatattggccgcatcgaataataatagcagtttctccttatcgaaagcggcttgcaatcccaacattaatgccgatacgatttggctaccgatgataaaaggcaactcttggtcattcaataggttcctgatggaggctatttcttccttattgagaggattcgaggtccagatcttattgaataataggatcgtggcggattcgatttgctgctgctccgtgatggttccggtcggagtctctatcttcaccagagaggcgtttctcaagaccttgtggagctggtcatagttggtaagctccttttgcatcattcgcctacggctataataggagagaggcgaatctaccgataaggccttgtgcttcactatatccgcgaactcatagctggatgcgatcaagttgttgtatatctggtcttgcatcggatctttagccccctcgatccggtatcgcaacatatatttataagtatcttgtagctcgttcaacctgtcttggaatgagtactcacgtattcccgctattaaaccttggagaaaatcgaacgcattctttagctccttttcgtctaatgaaccgataattcggttgtatgctttatttatttcttgtattgtcatatactattaacaacaaatggtatgccaaaagtatagtatttaggctaaatttcctatcttcgcgtacctaaaaataaatttagcagatgaagaatatccgcaatttctgtattattgctcatattgaccatgggaaaagtaccttggcagaccgtttgcttgagtataccaagacagtagaaggtaaagacatgcaagctcaagtccttgatgacatggatttagagcgtgagcgtggtattacgatcaagagccatgcgatccagatgaagtataattataagggtgaagaatatatactgaacctgatcgatactccgggacacgtggacttctcgtatgaggtttcccgttctatcgccgcctgcgagggtgcgttgctgatcgtggacgcggcccaaggtattcaggcgcaaaccatctctaacctgtatatggcgatagagaatgacttagagattattccggtgatgaacaagattgacttgcctagcgccatgccggaggaggtcgaagaccagatcgtggaactgttgggctgccctcgcgaggatatcttacgggcgagcggaaagacaggcgagggagtgaccgagatcttgaatacgatcgtggagaaggtcccggctccgaaaggtgacccggaggctccgttgcagtgtttgatttttgactccgtctttaatccgttccgtggtattatcgcttacttcaaggtggtaaacggcgtgatccgtaaaggtgaccatgtgaagtttatcgctacgggaaaagagtatgacgccgacgaggtaggtatattgaaattagatatgtgcccacgtgaggagatccggacgggagacgtaggatatatcatttccggtatcaagacgtcccgggaggtgcgtgtcggtgatacgatcactcatgtgtctcgcccggctaaagacgcgatcgccggttttgaggaggtgaagccgatggtcttcgccggtgtctatccaatcgatagcgaggatttcgagaaccttcgtgcgtcattggagaaattacagttgaacgacgcttccttgactttccagccggagagttccgccgcgctgggttttgggttccgttgcggtttcttgggcttgttgcatatggagattgttcaggagcgtttggatcgtgagttcaatatggatgtgataaccactgtaccgaacgtttcttatatcgtgcatacaaagaaaggggaggagatcgaggtacataatccgggaggcttgccggacccgaccttgattgatcatatcgacgagccgtttatccgtgcttccgtgatcacgaacactacctatatcggcccgatcatgacactctgtctgggtaagcgtggcgtcctgcttaagcaagaatatatttctggtgatcgtgtcgagattcattatgacttgccgttgggcgagatcgtaatcgacttttatgataagttgaagagtatttcaaaagggtatgcttctttcgattaccatttacatgatttccgtcccagtaagttggctaaattagatatcctgttgaacggtgagccggtagacgctttgtctacattgacgcacgtggataatagcgttactttcggacgtcgtatgtgcgagaaactgaaagagttgatccctcgccagcaattcgatatcgctatccaagcggcgataggcgcaaagatcatcgctcgtgagacgatcaaggctgtccgtaaagacgtgacggcgaaatgttatggaggcgatatctcccgtaagcgtaaattgctggaaaaacagaaagagggaaagaaacgaatgaagcagatcggtacggtagaagttccgcaaaaagcgttcctggccgtattgaagctggattagaaagtcaatggaatccgttcgctaactcaatggatttataaagaaaagtcaatggattctgtaacggattccattgacttttttatataaatgggtcacttctcgttcacgagccgtatcccgccatcttccagcgtgataagatgttgcttatagagtgccccgatcgcttgtttgaaagctttcttgctacagcggaataaggaatagatcacgtccggatcgctcttgtcgtgtaccgggatgtatcccccttgtgttttcatcgcttccagaatgacgccggcgatcccctctaccttttggtagccttgcggcgttaggctcacatctatcttatcatcctcacgtacctcttttatatagcctttcagatgctcgcctttctcaagacgctggaatacctcattataatagatcaatccccaatgctggttattgatgatcaccttatagccaagatccgtctcgtcggctaccaataactgaacctcttgattctgctcgtaatcgataggggtattgttcaagaacttctcgatacgtgcggatgccatgatacgtcctgtcacatgatccagccggacatagaccaagtaccatttcccctctctcatcggcattttctgctccttgaaaggaacgagcaaatctttcatgataccccattccagaaatgcgccggcattattcacgtcttttacctccatgaactggaactccccgaccgttgccagaggacgtgcggtagtagcgatcaacctcccttcattatcatgataaataaacacctcgacctcatccccgggcttcacgtttttaggtacgtaacgagtcggcaacaagatctccaccccgttacctccatccagataaaccccgaagtcaaggtctttcactattttcagcgtgttatattttcctatctcaaccatatatttttgttttgtcacaaacttacgcaataatcatgaaaaagcggtaaaaacaactataattttgatttagcatgcagcaatatctagacaattgcatcgttatagaagtatctttatacttgtggtccttttgagacctcatgttcaaactaaaaaacgtatatttgcaccttatttgaagaaaacaaagattatgaaagtgaaattagtatcagtagtggcattgtttgtcttattgttaggggcttgttctgttcctaaagatgtggtttatttccaaggagtggatgccttgacccccgaacaggtgagtaagatgaatcaagcttatacctcgaagatttgccctgatgacttacttacgataaccgttacggcatgggatccgacagtcgttactccctttaatccccctgtatatgcctatgcaactcaaggtgagactacgacggtttcttctggtcaattaagaacgtatttggttgatcaggaaggtgacataaatttccctgttttgggaaagatccatgtggcgggattgaccaagcaacagttaagtgataaaatgcaagaaatgatctccccttatgtgaaagatgctttggttaatgtacagattgttaattataaggtcacgatgatgggtgaggtctctcggccgggtgcgatttccgtgaaaaatgatcgtctttcaattttagatgctatcggtcaggtcggtgatttgacaattaacgcaaaccgtaagaacatcttggttatacgagataataatggagaaaaggagtttgctcgtttggatattaccgagccggatatatttacttccccctattattatcttcaacaaaatgatgttgtttatgtggaaccgaataatgcgaagaagagaaacgcccgttatagtcaagcccaacaatatagtataaccgtgttctcctcaattttgagcgctgtatctgtgataacgactgttatattggctattactaaataataattagatgatggaagtgaaagacaacgaaacaatcggacttaaaagtattatcgtaagatatctattgcattggaaattatttttaggggtattcctgttttctataatccctgcggttttatatctgatttattaccctcgtacatatgagatgatggcccgtatccagattcaggaagataaagacctcggaggaggtagctttggattgggagaggccgctgggttgatgaaatcttttgggttgggatctgtttctggaggtgtcgttaatattgatgatgaactaatgacattgacttctaataaaatgcttcggaatatggttctgaaattaggcgtgaatgtcgattattgtgaaccattttctttgggctatcgtttatatgatgaatctcctttaaagttgattgccgattctgctacaaacgcacgcttggcagaagctgtggagttctcggttttcgtaaaaaatggtaaggcggaggtttcagcggagtctgttaatatgaaaaagaaacattttagttttccatcattgcctgctaccattgagttaccgatgggaaacttcaccttggactttgcgccgggaaaaaaagatatcacctcagcgaaacttgatattacatataatcctgcggggtgggtcgcagaggatttggagaaagaatttttaatagaaggaagctccaagacttcaaacgtaatagagttgagttgcactgattatgaaaagaatcggggtacggatatgctagatacattaattgcgatctataacaaagaagctgaggcgtataaaaaaggagaggctcgtaaatctttggttttcttagatgggaggattgagaatattatagcggaacttgccgctgtcgaaaaccaaattgaagaatataagagcaagaaccaattgatggatatagagcatgacgttcaattctatgtggaacaaatgaaagaactacaaacaaagttgatagaattggaggctcaatccaatgtcatcaatatgatggatgaattcgtgaaagatcctgcgaataaatataatttggtacctgttttattgaccgctcaggaaggggagaaaggaagtgcgttaactagttataatgaagttttgctagaacgtgcacgcgtaattcaaaattcgagtatcaataacccgctggtcggaactttgactgagcaagcggataagttacgtggaagcgtaatagaaaccatcggtaatgctcaaaaaggaatgcagcggtcaataaaggatgtaaaagcgaaggagcaggaaatttatagtaaaatgaataattatccggttgcggaaagacagtttgtagagttgaaacgtagacaggaaattattcaaggcgtttatttgatattacttcagaagcgagaggagaccgctcttattttaggtcagacaagagataaggctcgggtgattgatcctgcctatgtaaagagcaagcctgtcggtcctcgtaagttgtttgcgcttattggaatgttggtcttaacattggtgatacctatatcttacttatttgtaagaagacaatcgtctcttcttatccaagaatataaaaagcaaagtaaagattctaagtaatattttatgagtgttgttgatttctcgaaattatatcctgacaatcgtcaagaaggagaaacggtattgcgtcaagcgcaattagtgatgttgaggatgcttaagattattgattatatatgtcgaaagcatgatatttcttattggatgtgctcgggtaccttattaggtgcggttcgtcataaaggtttcataccttgggacgatgatttggatatctgtatgattcgtgaggattatgagcgttttgtagagattgccgtgaatgagttccctgaagatatgatgttgcagaccagagagactgatcctcattaccattatttgcctttaccttgtaaggttagagacaagaaaagctttatattatctccgggatatgaggatgaagagtgcgagaaggggttgtttatagatatatttcctatggatcgttatcataaacagaaattgccttttatgtttgaaaaaatggtgaaggtctataatacgtttatatgcaagagcttggatgcgatatatttcaaggatgagtctatagataaaaagatattggctttttttcatcccgtattccataaactggttcttcaatatatgaaattcgcaaagaagcttattgataagaataggggattaggtacagactgccgccttggtcatggtttcgataccttgtggaaaagatatcttcgatttgacgatatctttcctgtagtagagatagactttgaggattcaaagttttttgcgcctcatagaccagatgtatatttaacgacattatatggtcctaattatatgactccacctcctgagaagcagcgtttggctgcgcaacatgctcatgaaataaagccaattatataaaaatatccctcaaaatagctaaacagtattttgagggatattttttatatcttgtcaaagattgtagttactttgtcgctgacattctgccacgtatactcgtcgagtggatagtcaactctggtaaattcttgagccagtttttgttttatgtgcttagatagatccaaagcatcccctgttttgaaatagtcccctggatttagctcaagtaatttattagcgggtatatcacttgccaatataggtagatgataactcatcgcttctaaaagtactaatgggaagccttcattataagaaggtaatacaaaaagtctggcatgggagtataattgccttagaaattctccatccacatatccgggcatgattacattctgtttttgggctctttcgctgatttcggacgaataggaggagttatggtctactcctccggctaaaacgagcttgaagtcatgaggtaaagattgtacgtagctatcaatcagataatcaaatcctttctcctgtgtaatacgtccaacagctaaaatatatttttgaggttgtaacccaagtttctctatataatcagtccttgtcgctagttgcttgcgatatactccattcggtatataagtggatttacgctgaattttatcattgaaaagacacatttgctttttattgacaaagattacggctgtagaaccattaacagctatccattcgctgaattttaatatttttcgggatatgtaattccatttcttatgttcatagtttgcgctatgatacgtaaggacaactttcaacccagcgagtttaaggagtggtataaacattccgggaccaatgttatggatatgtacgatatctggtctcttaataatacaatatatagtgcacaagaatgaatggaaaaaaggctcaaacccttttattcgtgtagaaggtagatctatgaatcgtatgcctttatataccttttccgcatttttctttaagaatggaatccttctgaatatagaaatgttatatttagaagtcagttccggataaagttgctcacaatgcttctctacgcctccttgtacattcggaaagcctcttgtcccaaatacatagacatttttcatcgcttattctgatcgataatgagttgatagtttttgatgagtttttgataatggctttcttctgagaagttatccattgcgaatttcttcgcctcatccgacattctcgcatattcttcctctgatatagaacaagcctttgtaatcgtttcttttaggtcatcgggtgattttggcttgaatgtatatccggttttgttttcaataatcaactctggtattcctcccaaatcactaccaataacaggagttcctatcatataggattcaatgattgtcatcgggttattctcatagcattcggatgagactacaacaaaagaggcattgtgaataagttcccgcagttcttctccttgtttgaatcccagaaactctgcgtttggagggcattgagactttagttgctccaataaaggtccggttccagctaattttaattttatatcaggaacttgcttgatcgcattcaataaggtgaggatacctttttcctcggatattcttccaaagaaaaagatataatctccttttgttgaactgtaatcttttaccttcggggtaaaattatacaaataagtacatctatccttgaatcggttctctacttgaatatgcttattcatagagaatttgctgacaaatatgaatcgattgatgtaatcgatcggagaatagaattttgatcggaaataactatccatgctcaacatgaaactgttgatgaggctaccttttgagcatttgtgtgttatgcaattgtagtaattcccggtcttacaacgctcacaaaaattcctttttccatccgtgaatgtgtatgcaggacagactaaacgatagtcgtggacactcatgataataggaatattgtatttcttgaggactggtaagatcgatacagacatactattaaacatcagatgtatatgtgctacatccggtttctccttttggatcaacttctctaatttacgtgcggcttctttattatagataaaagccggtaaattttttattttcttgggtaaagaagattccgatagttctggatagtctacaaaatacgactcataaggagaaggttcgttcttcttattcttaagactgaatgggataactgtgtgcccatgtctctcgaggagctgaatcgtgttgaaaaagacagtttccgcacctccttttttgaaaaagtatttatttatctgaagtattttcatcttgtaactcttttgcatttggatgaacttcatctgtcaccccgttcttcaaatctgataatattaaacctaatagcataaggacaaaaaagcctctatgcgttgtaaatgttgagtcggtagtgccctcaatgataaagaaaccaatgatcatcaataccatcgataagcatttcatattatatgtccttttatggaatttaattgccttcataaggatatagatccaaaaagtgatgtataagataatccctacaatgccaaattgagctaaagaagggtagtaggtatccgctataaagttgtaatggtccttactcataccccatactccatctattccatattttgaatagatactcgaataatacactcctgaggagaaagtcccaaagctggcgaacccgctaccgaaaggaaagtaatctattaatatctgtggggcggtcgcatataatacataccgggcgatcatgtctttgtctacctcgctggttaatgtctgatagaaatagaaatagatcttctctctagcgacaaataatactgcgacaatagttagtaatatgatcgtaatattctttgcgtctaacttgaactgctttatatttgagaagtagaacgtgataaatgtggctagagcgaaaaatccatagaatttagatctaccagatattagtccaatagacaataaagcaacaaatgtaatcttatccagattagtgaacttactgcaatacaaataacaaagggaaacgcatacaacggctgccgcataataagccggatgtcccatgagatggaataaaatcctaggctctacagcttttcctagtcccatcagaagcaagagaaaccaaaatacaaggcatattgatttcatgatatttttctgggattcgctaaatcttggcatcattgagtatacgcagaaaaaagcgagataaggcttgatctggattaacatatctgatattatcgctgttttcgtattacttccaatgtatagggagtagcaaaaatagaacaggaaaataccaatggttgttaaaaagcccttgttgaagttccagtcggatgtggaaaacagatatataccgaataaaacgaataggaataaggcgcaaatttcatctgtataatcaaacccgatggcatcgtataacaatataccaaaagtcaaggtgaaaagaagcagattgaaaaaatgtttattaatcaaagactgtatcatacttttataagagtacgttgagtaacttgtacatatttatattatgaaacaaagttatgggttattcttggaataaactatgtttcatcatcctttttgcatttatttgctttttgtggtttgtatgaaaatgtgtaaattgttgattgatagatttttgtttgtatctggtgaaaatgaagaactgagatattattgaattttttttcttttaggaaaattatctatatgcatatttttattttgtttgactttatttgtttcttgctcaaatgaagatttgttaaattctaatttgggagtgagagatggagcatgtttgtctataaatatgcaggatacaacagatgttgtacctgagaatctgagagcaatatcaagaactaatgaatattgtgtggctagagggtgtagtgcgatacgaattctttcttctaatattaaaatggcgtttgatacttcaacggcttagttggtaggcgttctgccgcatacaatatatattgttgatacgaggcagggtgaaattgacgtttatgagtctgaggattttattgttacttcaaattattctccagaatgtggttatatgccgacagctggattatcagatattggttatactataggtagaagaaatggtaaaatgatattttcttcaaatacattacatattaaataaggaatatacgataatatatgtttctattttccatttatatctaataatattagatggagataattatgaaaacattgaaatggtttgcctatgtatttgcgattgtgtttattgtgggatgttgaaaagaagacccgattcctgatccgaccccaactcctcctggtaaaggagggctgaatgggaagattacattatggatccgggagaagagttcaaatcttacggatcaatgaagggattgagtttttcacttcgttagagtcattgacttacgcactggttgattctgtagatcttagtcagaataaagcattaaagatcttggtatgtaattcccataccaattatctgaagcttcccgaagattgtaagttagatagtttgacttgttctacggtggttcttgaatcgatagatataaatgcttgtaagcaattaaagaatttatgcctcaaaataaagacaacaggagttattcttaatgatttgccgtccttggagcagctatcatctatcgcatattactcagatggggctagtttccaaaacttagatttaaagaataataaacgtttgaagcgcattgtttttacgggagctattggtttaatggatattgatttgagtggttgcgaagcattagaggaatttactcctacaggtaagaattatgcattgaacttgaaaggttgtaagtctttaaaaagtttggccgctgattatgcgtattcgattaacttggaagggtgtgttggcttggaaacgtttgaaagtagacgcattggcaatatagacctatcagattgtattcgtttgaaggaaatatttattgatagtggagatggtgttttggatttaagtaagaatcatgctttagaaagtatcacggtatataatatgacgataaaagaactaaaaggaagtctttatcctaatttgcggaatttgacttatcggtcggatgcccaaccttcttctgttgatatccagaattgttcagcgttggaatcattgtatataacttctagcctcctgacctcattacagtttaaaggttgtacgagccttgataatacccggttggagggaaatgcgggggaagtagatgttagtgattgtcctaatttgtttttagattgctatggattaacttgcttggatttcaataaaagtatccgaggcctaaaactatatacaactgaaagttttccgggcttggatcttagtggatgtgcttcccttgagcatctggaattttataattataatcctagtgcttttttacgtttgaatggatgtcaatctcttaaatacttgaaaatttatcatttatatcaagatgagttgtcgttcgctgattgcggagcgttggaagaggtaacaatggaatgggtgggcattaaagaattagacttgagcgagaaaactaatttaatttatcttctatgttctaacatggatatagaatgtttggatacgagtaattccccgttattggaaaccttgaggtgtccatcaaattctcaacttaagatgttgaatataaaaggtaatcctagcctgcaaaacttggattgtaggtcctgtgctttgcagtcgttagatttatctggtaatcctgcgttgcaatatattgattgctcatcgaactatgttttacgaacagtagacgtgagaccttgcctttctttgtttaggtttactgggcttgatagtgtagaaaccgtgtacgtgaccgcaaagcaattttcttctactacttttaatgtgcatccaaatacacgcattttaatacaatgaactatatgttgtaatagccataaacttttaaatctttatggctattacgaccttttatcgggaatttgcgttttgtgggaaagttgggcaaaaaagtaagttaacttcatcggcaaagtaacttaacatactttgccaacgaacctaagatacttggttgatgaagctaagatatgtcttttcttaaatcacttgtcaaatttgcctcagcttcttacgctcggaatagcccgaacctacgtatcccccaaatacggaaaaggaaaagaagtgtctcagacacgactaccatcattgctaccgtgataggggcgatcattccgcaaacatataggatcgctaatccagtgatgtgtaccatggaggtggtcataactgtatagttcgtatatagagggtgccccatggccgccagaaatggatatcctagtaacatagaggggatggttacgaaacaagcgattacaagtatccggaatacttctaagatatccggatcggctgtcccatagacaaatcttaatacataacttgagaataaaagtacggtcgttacgcaaaagaaattggagaatgttattctatagaatacttttttaaagaacaagacatctctacttttcgctatatgcggaaataaaaccccagtgaatggtgtcaataactgattgtacgcttgatatagcttctctgctgccgaatagtaacccaccgctgtgtttccgcaaatcaaacccaatagaaacgagttgcttgtggtgaacaaagaggtcgaggcccgggagagaaaataagtggaactatcttttaaggagttactaacttcttcgatcgatgtgaagtaccatttcatccccattctgaagtaaacaataaagatactaacgatcccggcaagaataaagccaaaactatagcatatcggtacgtatatataattttccggttttcgaatgaagatgaaaaagggaaggaaactcaatgatttcgctacgatattgaataccgtaatgtatttcatattctccatgccttgaaaaaaccacatagggaacataacattgcctatgatcataccaaaatataggagataaaaagaagactctgatttaaacttattaaaacaagtgatcaggatgagtagtatggcgaaactgaccccgcataaaaagaaacgtccaagcattgtgctatttaggtaagagttgattttacctaaatccgttttatgctcagagatatatttcgtggctgataggttaaagccaaaatccgtgaacataatgaaatattgcatcaaggcatagccgaacgtcacgagcccccagcgttctacaccgagtactctgaaaagaaaagggaatgataataaaggtaataaataattaactccttggagcaatgccaaggagataaaatttataaccataggattcttgagcttcttttttatttccatgataataaagaccggattgaatttccttatttattcaatgaagtcaacgcttctgttagcttatcattgtcttccttattccggatagcgattcggatatattgtttcccttcgaaccctgctttagttccacagttttttatcaagatactatttcccgacaataaagagctacaaagttcctccgatgtgtaagtatcggttacttcacataagaaataatttgcggctgagggaataaccctaagatatgagacggcctgtagattttggaagaaacgctctctttcgtttaagaatttatggcaggctttgtcgtagtcatcactgtattttatgaaaatctgcatatagaattctgcgaaggagttgatattccaaattgatatatctttttttaacgctcgtatgagatctttgtttcccgacgctaaaaaacctaatcgtaatccgggaacgccgtatgactttgatatgctcttaatgacaatcaaatgtggatatttgtttaaaagctctttatctaacagggaaagtttattttcaggatttgcgaaatcaaggaaagattcatctatgattaaacgaatcccttttcgttcggaccattcgactagcgcaaatatctcatttttagataataaatttcctgatgggttatcagggttaattatcaaaagttgctcaatcggtttgttatcaaagaaagatataatgtctaaagcagtataagagaagtctcggttgctgggagtataatacaccagctgcttaggggccaaacggttcgggtattcctcgaatgttggtaatataactcctgtggtatacttagaggtcatacgcatataaccactgattaactcggccgctccgtttcctacgatgatttgttcggaggatattcccgcataacgggcggctagttgagcgttttcttgcataccggaaggatattcggtaaggagagtatcgaaattggctttcatttcttccttcaatcgggtatttgggaaataagggttgacgagatagcagaaatccaataacatagggaaacgccagtatccaccgtaacgtttgccgtataaagataatgcttgcttgccttccgaaaataaggcttccgcattatttaagtcctgttggtcatctatctcataccatttttcggttgtaatcgtcaaggcctttaaatccggtctgtctaataaggatattacctttagaacttgttcgtagtattcattattaccgagggctttacaataagcttccaagaacggaatatacttattagtggaaaattccttactgaatttatatatatttacggtcttgtaataagactccttttggcaaaattgaaacgctttctttgagatgaagttcaatatattgttatcctcatccagccgtacgacggtaccatccatccaactttggtatttggcaactactgccaaatttggatagggatggtttatcaatttgctgagaatggagttctcaaaaattagatcggattcaagtagaattgtctcgtcctccaccagatagtttttagcgagatatagcgagtatatattatttgttttatcatatacattgttctctacataaagaacaggagtgttgtttatcttatctccgataagctcacgtaccttttctcctttataacctatcacgataattatacgtttcagagatagagcttccagttgtttaagcatacgttcgattaaggtttgattatgtaccttaatcatgcattttgtgttgttttttgtcaactctttaaggcgtttgcccatgcctgccgctaatatgatcgcttgcatatcttattcttttttaattgtataaacaaatacccctgtcgattttactgtcaaaatatcaatttgactgtacataaccgagaaggggttgtctttataagatgattctattatctaaaacgctgcatataatgtaaaccgatatcatatccagaattttgatacctctctttctatcttaatctctggagattgcgcagataaactatcataaattttacttgcgaatagaatatcatgtagaccaagacctatattgtaacttaatatccgttcatggtcattttctctgccagccgttctacctgataaaacgtcttctagctcggcatattgtttgaattgggaaaaataacggaatcccttcacatgatcggtatcatcgccatataccttgtcgaaaaagagatcgcaattttgaaatcctctcgtatgtatcggcacgactaggcatccttctttaaataggtcatttttcggacagatcaagttgcttgcgtctgttatacaactgataataacatctgagttggatatgagattctctatattgtctatgatcgagaatgtaacattgggataagccccgaatctctctataaaggaatccgcttgatccttatattttaatagctgaactgtatgatgcgtatttttttggctatcaagtaaacataacatagttgctctagctgtatttcctaagccgatgaaactgtaagtagtggcatcggtcgcttttaatgtttggatagcgagagtggcgacagctcctgtacgcatagcggttatccaatctccacccaatagggctaatagttctcccgtattggaatcatagagtaggatatcgcttcctaaagcaggtatgccacctacaatacgatgaaccaccttgattccaaacctagagaattcttggggtaagaggcagggcatggaagtgaaaaagtcattaccttgggggtgtacacttatttttgcgggtaattgagccttgttttttatagagaaactttctttcgcccaatctacacaggtcgcaggcgtaattcctaaatccttaatctgattttcagagataattttcatattgacttccttttttagttcatgcttatgccaaaaaagcttccaaagttatgtataattcttgaaatagtcttacttttgtatctcttttaaatgcactataaacataagtaatagatatatatgaaaatagcgattgtaggtacaggctatgtcgggttggtaacgggtacttgttttgcggaaatggggactgaggtcttttgtgtggacgtggataaggtaaagattgagaatctaaagaaaggcatagttcctatctatgaaccggggctagacgagatggtggcacgcaattcccaagctggtcgtcttcattttatgactgatttaaaagaatgtttgaatgaggtcgaggtactgttttgtgcggttggtacacctcccgatgaggatggtagcgcagacttgaagtatgtgcttgaggttgcccgtacggtaggacgctatatgaataaatatatcttggttgttacgaaaagtacggttccggtaggcactgcccagaaaatcaagaaagcgatcaaggaggaacaagccttgcgagatgtgagtattgaatttgatatcgcttctaatcctgaattcttgaaagaaggtgcggctatcaaggattttatgagtccagaccgggttgttgttggggttgagtctgatcgtgctcagaagttgatggcgaaattgtatcgtccttttttgttaaataatttccgtgtaatcttcatggatgtgccatctgcggagatgacaaaatatgcggcgaacgctatgttggctactcgcatcagttttatgaatgatattgccaatttgtgtgagatagttggggcggatgttaatatggtacgtaaaggaatcggtacggatgcccgtataggtagtcgtttcttatatgcgggttgtggatacggtgggtcttgttttcctaaagacgttaaggcgcttgtgaagaccgcagccaacagtggttaccaaatgcgtatcctagaagcggtggaagccgtaaacgaggagcagaaatcgatattgttccgtaaattaatgaaacattttagaggagatatacaaggtaagcgaattgctttatggggattggcatttaagccggaaacggatgatatgcgagaggctccttcgctagtcttaatcaaaaagttgaaagaagccggatgtgtaatttccgcctatgatccggttgcaatgcccgaggctcaaagacgtttacctgtgggggtgatttcatatggtaaagatatttatgagaccgtgatagatgcagacgctctgttgcttgttacggaatggaaagaatttcgtatgccctcctggtctgttatcaagaaattgatgtccacgcctttaattttagacggacgtaatatttatgacaagacagagttagaggaaaccggctttatctatcattgtataggtcggtaaattttaattatacgagattgtatgaatctccggatagttacaatcattagaaggtttataggcaccgaaataggtgatgtaaatcttcttttcttttgtatctacagcatagatacaaaaactgttacttgataggctatcctcttcacgtatgaccctgttgtataccacgcctttttcacttggagcttgattggtacaaaggatcattttttgtggaacgagttccgtgctttcgttttctaatccagtcacgtcaaaataggcgttgcagtggatatgtccacctagatagcagacaaattctcctttgcggtcactgaaatctgctttgacattgatggggtctaggttgaattgatttggatatactttttctaataaggaacgagtacgaaaggcttcaatgatttcgggaatcatattccacgaatggacataatccccatcacataaataggtatcgttatttacactacggcgttgaaatgggtaatgagttaagataatgacgctatgatggtctgtcatgccattttttaatgcggtgtttataagccagtctatttgtttctgggagaaatatgcgtaagataaagtattatattgggatgctggttggtctaacatatcgagggcgatgaaacggatcgtacctccttgagggtttgctacatccgaatagtaataattctcggcactatttcgattcttcgaataattactgttggcgaataatatttcgttgatctcgtttttataaaagaaggtactgcctatctcttcttcggaattactatcatgatttcctgtacaaataaaggtggggacatgattttcatcataaaggtaatgaataaatgagtgcatatattctttcgccttctttttcttatcaatagagataaaatcacccgtagcggttatcgcattgatccgcagttcttgttgattggcgaattggatggattgtcgtagatttataggtaactcgtaattattgctcggagaccaagaggataaatgagaatccgaaatatggacgatcttaaaacgttcataacttccactatctgttttattgtacatgattttcgctagtctctgagctgcgagcttattgttttcccaataaaaaggttcattctctccgctacgcaagttaaggtttttccaatcatctttacagcctactgataagatcagcaggataaaaagggcatatatttgtaaggccgtgttattcataacctatggtgtattagaataacgcaaatataaaaaatattttgttattccttcattctaaactcttttttcaacgaacacccactacacccacagcaaggatcactggatttcggtttcgtaagcattcgataaaccttatatgcgatatatccgataaccgagataccaataacgcaaactgctatatcttgccacatacctataaatttacctcctatatataactaaataaaacataggaaagttcttagctgaataaacccacaaagaaattccccgtttgataaacaatgaaagaaacgatccatgctaggacacaagtataaatgataacgaatataccccatttccatgagccagactcgttgacaatagccgatatagtcgctatgcacggaaaataaatcaagacgaaaagcattaagctaatcgctatgagcggtgtgaataccaaattaccttccgcgttacggtcttgcttcaaacgctccgacagggcttggctgtcatcatcggcattccccgtgtataatacgcttaacgtgctgacaacaacttctttcgccgccataccggtaagtaggcttacactcattttccaatcgaatcctaaaggagccaagatcggttgaatcgtctggccgatacgcccgatatacgaattttgttggtggtcgattgccttcaagcgttctaactcctctatcgtatctgttttttcttgagaatccaactccgtattttcgatctccgctatctggcgatcaaactgatctccgctctccgaatgtctggggaaatacccaaggaaccagatgatgatagaagcgaccaagatgatacctcccatcttgtgcaagtattgtttcgctttctcccacatatggatcatgatggatttgccggtaggcatccggtagggggggagttccattacgaaaggaacatcctcctcgttaaacaggaagcgtttgaaaagacgggccatgataactgccagcaagattccggatacatataaagctaataacacaaagctggcgttcttcgggaaaaacgccccggtcagcaatacataaaccggcaggcgggcgctacagctcatcaacggatttaccaacatcgttatcatccggctattacggctctctatcgtacgggaggccatgatagcaggaacattacaaccgaatcccatcactaaagggatgaacgactttccatgcagtcccatcttatgcatgatcttatccatgataaaagccgcacgtgccatatatccggagtcttccatgaacgatatgaacatatacagaatcaagatattcggcaggaacacgataacacctcccacgccaccgatgataccatccacgagaagatccttcaaaggtccttccgacatatggttgcgcacgaaattaccgatcacctcgaccaatgcctctatccattccatcggatagcctcccaaacggaaagtggcctcgaacatgatccacatgaataggataaagatagggaagcctaagactttatgcgtgacgaatagatcgatgatctgcgtactcgttgcctctttgatcatattttgttcgtaagtctcacgcaacgctccggaaataaagccatagcgtgcgttcgtgaatgcggtctcacaatcctcttgcaataacttttctattagggctgtattacggtctctttcttggaagatcgtttcggcaccgggcagcgtttttataaatgtctctatctcccggtctccctctaatagcttgatagatagatagcgctttgacaagcttttgggtatatccacgctatttttcaaggtcttcctaacgttgctgatccctttctctaaagactctccgtaattaatatggatatgacggatgacaggatcttcttcttcgtataccttgattacacggttaaacaaatcctctatgccaaagcctgttttacttacggtcgggataatcggtgccccgatcattttcgctaaggactcatgatcgaatttattaccatggcgttccagctcatcatacatgtttaaggcgattaccatgcgaacgtccatatcgatcagttgggcggtcaaatataggtttcgctccagattggatgcgtcgataacattgatcaccacgtctggttgctcttcattcaaatgcttacgcacgtataattcttccggcgtgtaagcggatagggagtaagtacccggtaaatctacgatgcggaatgtatagccattctgttggaaggttccttccttggcatctacggtcacgccgctatagttacccacatgctcatgtgctccggatgcgaaattgaaaagagaggtctttccgcagttcggattaccaaccaaggctacgttaattgtttttcctttatgtaatgcgatggcttgcaattcattgccggaaggcaggataaaagagtctgcactcctgttcgtatcttgtaccgaggtagcttgttccttctcgaaatccgccgcgctaacgacttcgatcaatgcggcgtccgagcgtcgcaatgagacatcatatcccattacacgatagtgaatagggtctttgagcggagcgttttgtataacgatcacttctttccctctgataaatcccatctcgataatgcgtttgcggaaagctccgcgacccattacctttactataacacctttatcgcctgtgcgaagttctgataatctcatgtcctattaaatgttacgcgaaggtagcttgaaaacttcgtaccaccaataccaactaataggtatttttttatttccatgggttgtttttcgagtattttatgtatgtttgtgccacaaatttcaactttagacaaatgaaactacgaattactttgttcaccaccttattggttcttctgtctgcttgttttacaggctgtaaaaaagaattgaaggatttctcttttagttatagtatggaaagtgtagataactacaaactaatggttctgtttgatagtgacaagacattccgtatcgaggagtataattattatatggataatttcgccaagaaacgagatcctaaaattatggaggggacattgactgacgaggagtttgcttctttaaaaccgattctgcaaaaatgtaatttctttaagatgaaagactcttatggctttgaggaggagacgaaccgggatttaggggatatcatgtatcaggtttcatttaccacggaaggtaaggagaaatttatctctatccgtaatagcgataccggacaattttccgcttctttcgtgaagttgatcggttttatcaatacattcttgaataatcataagaatgactaaacgcttttagccggagatggagaataaacgaaaccgggttctattgtgcttaggctctaattgggataaagagaaaaatatggagcgcgcggcggagatgctgcgtgctcattttgtttttatacagttttctcagccagtttatacggaaccgatcgattgtccattatcaactacatttttgaatcgagtggctgttttgtatagcgaggagagtccggcgcgaataaaggatgtcttgaaagatatagaatgctgcatcggccgtaagccggaagataaatcttgtgggcgtgtgccgatagatattgatttattgcagtggaacgaccaaatcttgaaagcagaggacttgacccgtgaatatgttctagatggcatctgctcgctccttgccgcaggagagaatgatgaatggtgccaatagaaaaccaaaggagccgctgttgcggatcaatgcgttgatacctttgcatatcaaagaaagaactgggttgtttcggtctgcgttataaaatcctttctctactttaagcttgaactggtagggtgccaataagtcctcataagtctgtatgggaaggattcgttcggcccaattacctgtagccggatcgcaagtattgtatgggtcttccgggcttggtaaactctttttctcgatcgctttttggatatcgggataggtcaagcctctagtctgccgggcccatgtctctacttcttttggggagaaagccgggcaaagtttcgttatgaattgctctcgtaatgtataatagttgggggattccaaagatccactttcgcatccgatcatcatcttatgtaaccgttgttggacatacgggttgaatggtgtagaggctgtcgtgaatagtagatacatggaatcgtttatatggattaaatccttgaagaacaaagataaatcatagacatgttctatcaggtccgtagcgattaaaagttggggggagactttgttccttgcgcaccagtccgcaagaacatctgaatctccatggagtatggtatcggggcctattcctattatttgtttcaatagctggatcgtctccacggaagatgggttaagatcaatataaataacttgtcctattcctatggatttcgccagaatactaaggaagccggttcctcctccataatcgattagcgtgacatcggagataggggtttgtatcgcttgaagtcctctttgtaggcaatctgcgtatatatgcatgaaatagcttaacgccggctttaagttgccgatgtatcgcttattataatcgctgataggtaatttattatagtcgatcgctttcaaacgttcggttaatgtatgtaataaatcacttctattctctttcatcatatatcatcttgtataaacgtatcccctgatcttcattagaaaaagcagggaacaataattgttttcgtttatctatcgcctctttatctataggtagggccattaattgttcgcaagcccgtatcatctcatccggcgtatcggcgatatggcataaaggatctaatccgctacccgctagcatgagatgattgacaatcgtatgccttccggcgaataagctgttcaaaagctttagttttaggccggtatcttgaaatgtgattagcatatgaatttgtgcgttgtggatcaatgcgtccatacgttccttactgggatttgcttctacttttatatgtgggtaaggagcggctgcctctcgtatcaaacgggtcgggttcatgcccgctattatgcaggtatgttttaattggctgaaaacatgcttggtgagaaataacacggctcgctcattctcgataacggataacttgccatgatataaaatataatcggattttcccggtttggccgtaatccggttattctcgtggaaacaaggaacgaactcgatcctttgattgggaaattgttttcgtaaatagtctgcgtctgtcgtggatacggcgattatcagatttgcgtactgtgctactttctgataggcttggaagcgcatggcctcgatcttgaaaaaggcattgcgaaccaatcctttgccagactttgccaagtggcgataataatcgtgctcgatattgcactcccggaatatcttcatccggtttcttaaacggggatcgtccatataatagcaggagtggaggccctcaaataagatcgggtaatcattttgtaaaagattctcgatcaagcgatgatctttacggctatatacattgtaagggagccatgttaaattagcgattaccccggtacggcgtttataatagaaaaccttgtcgcaaatgctttctaattccggtgcgtgcggacgttcatattcgaaacaatgtaatatgagtttcacgccgcatgcatgcaaggcctccagtttataatacacatcaatgacccctccgtaattggcgggataaggtatattgaacgatactatgttgaggtatttatccatctgcttaaatctcctcaaatatacgcgcaaattggctagcttgctctttccgggaataattcgatagcttatcccgattgacgggcgaggtcgtatatcctttttcctgccattcctcatagtaatgtttcaagaaatcgtacacctcgtctacccgggttgcggccagtccagaatgggtctccttgatggcttcggcgaggtaagcctcgtcactctgtacgcataagatgggtttttctaccgcaagcgattcaaagaacttagttgtcatgaagccttttggaccagacgtgtcaaacttattcgtcaaggaaagcagcaccgagcttttgttcaagatgaggggaatatcggatgccggtacatactcatggtaatccatgaaagattgcaccccatgttgttcggcctcttggcggatgatggagcgggactcttgatcggtataccatacaactcgaaaagtttcggggataatgaccttgtcctccgtaagacgggcgatggccgcaaataataactccggatttcggatcgctaaacttaacaaccgtccggtataggtaatgataaaccgggaggtcttgatttgttgcggatagaacaactcgggatcgaatccgttataaatcagttttacattgggattatattgtttaagtacctccacgtgccaaggcgatacggtcgtgacacaatccgctacctccaaagcgttattccgctttctaagtaaccgtttgcgaaatcgctttgtgatgaatgcgtctagccatgaaaatgtatggaatttatgcgatatatattcgttggaggcgtattgctcgataatatctcgtaaatccacgacgaaagggaggttggtatggatcgctaacgtcttggcggcggttaaaggaaaggtacggtatgtgctacacaatattcctttgtactggttggtctttattaagggaatacatgcgttgattattttcatgtctttataaccaaacaagatgtctagaaacatgacccacatccattcgatatgctttgagatctttcctgatgctttgtagtagcggacgcaatacacgtccgcataccccgtaaggaattcgaatgtattgtcttctatgtattctgtcactacggtaacttcccatcccatgcgtgtcaaatatttgcatagatatcccattctgggggcgaaagcgggtgggaacatatcacatatgataaggagtttattcatggattcaatcagggttataagaatagacgaatgacttcaaacgcttccgcataggtacatcctgcttggacgccccgtgctcttgctaatgaatagataaagtccttggatagataatctctcgctccttgcgatttataggctttcaatgattctacctttgcgtcgatatggcgctcttccagccttacaaaacattgtgtattgaatgtcaggttgttccagattaactcataacctaatatattcgtgtttttgaacgctcgtagaccctcttgggcgatcgtcgtatgatcttggtggatgtcgtgcaagctagggatgaagactaggtcaaaatcggatacttttttcaggcgtattaactcctctaatatctcttgtcttgcgtatcccagttttcttacttcgtaattgtatatgattaggtttcccggttctatacctaaggtctgggtcgcttgcttgacctctgtcttcaagatatctttcggaaaaccttcgggaaccgattgctgtgcggtggagaaagccacataggtcacttttttaccatcttctatcaggcgtgagatagttccccccaacccaagttccccatcatccgtatgaggggcgaggactaaaatatttttacaattagtaatcattctttctgatttatttgaatacagggattttgttgttttcactgcttcgctaattcttttaatagctgggcgtataatttacgtaaataacttccggacccttcttgtacggagtcattatgccatagtaaaaccaattcacctcctacattatttacttgttccactaaattccggcaataggttaaagccctgtcaaaatccagtcccatatatttttcctcctctagggtacaatccattataataagcggatgtagtcggagaggagatagccggcgggtgatcggattgatccaacgaaccgggtagcaagtccctaaccggaatccggagacatcggcataccccatggtgaaatcgtccgtaaccccagcagcctctatttggtccatatcttccggttcccggatagccaagaaatgatgacggttgaaccgaacatttttaccgatatgatcttccagaccggttttctctttccggataaggctgggagtcgtacccgcttggtagctactatgcaaaccaatagttacattatgctctagagcactttttatcaatttacgaatatctttattcctcaaatcgtaatgaggtttgtcgtgcttggctttccccccgttccggataaataggatagggtgacattgttccttcccgatcaaatcctgaaggatactattctggcggaaaaaccaagggaaggtataaaacgggtctttctcaagggtaccgaatttaccttgaaaggatttatataaacctcttctatctctaatagaccgtatcaaacctttccacgaacgatatagagtcggagaatctacgtcgtgcgtgaggtagatcttccggatttgcttttttacctcgggtacacgtaaccgggattggcgtagccaacgatgaagcagcatgcgatattcatccacgatcggacgatgcaggaaaccggcccggtagggcaaggactctttaccgggaaatcttccatgctcatcccgaagtccacgccgtaccatctcctcgtatctggaaatgagaaaataagtacttgcgatgatatcggcatgaaccacccatgtatctcttacccattcctctttcggcgagccgaataacaaggggataccttgaacctcttgcaaagggagttccggtaaggaagcaggagtcccgtatgtttgtccatcaaagaagccggatggaatgataacgacgttatatcggtcgaatttattgggatcagccgtgtacccgatcgtttccaccagttcgctagggacatcatctcctacaagaaaacgtattatataatgtaaagtgcgatttttcatacccatttgcttagtttaatgcgtgctctgtctaataaactcaatttccccctagatattgtgaaaaatggggtttggatagctccgaactcgcggaagaaacgttctactccgggtagcatagacccttcgaaatcaaataccgtcgtaaattgagaaacgaaatgaagacattcccacaggacgtagctttgcgctccggaacctctatagaccggatttcctcctccagcgagatagtaagccgatcgatcttgccatacgatgaaagcggccgcatgtaaatggccttgctcgtcataacctccccataaatcaccttgtcctctttgtcggcaagtggcgatcaagtctttcagtacattcgtgtcttccttgattcgtacatgctggcggtcaaatgtttgggcttgtacagctaggaactcattcaaaggaatccctttttttacggatatatggtatttattctgcgctttcgtaatatttcgccggatattggggctcatattctcccataccgcttgatgatcccggatattttttaataaataggtataacgtgtcgtttggttatatcccgcccaataaaacggaagccaatccgtgatgtcataattgaaattttgcaggaagtgcggatagcgttttagttcttccgtgaattgtttgcatagttcttgacgtcgtcctaactcggtcgtatatttcgtgtcggaggaacttgcggtgaaccaagggcccattgtttgggtgtaagaaggcattgagacaatatcggaatgggggacgtaaagggggagggttgcctgtatctttcccttttgttctataagcaagacatcccattttttttctccgcaaaccgtatccaaccaccagtcatgtgagaagatcggtatatttttttcagtattgcaaagtaaacgatatttgtctttattactcattacaatttcgtataggggcggggggtgcccgcccctgcaaattacttgttggcttttaatgcctcaaatattaattcggataattcgtctgccaattcgggattgtcctcgacacattgttttgccgcatcacgaccttgtcccaatttggtatcattgtagctgtaccacgaaccgctcttcttgatgatattcagttcagagccaagatcgatgatctctccggaacgggagataccttgaccgaacatgatatcgaactctgccttgcggaatggaggagccaccttgttttttatgactttcacacgcacttggttacccttgatctcgtcaccatctttcagctttccaatactacggatatccaaacggactgaggcgtagaacttcaacgcattaccaccagtcgtcgtttccgggttcccgaacattacgccgatcttatcacgcaattggttgatgaagatacaggtcgtattcgtcttattgatcgcagctgtcaatttacgaagggcttgcgacattaagcgagcttgcagacccatcttgctgtctcccatatcgccctcaatctcagctttaggagtcaaagcggctacggagtcgataacaatgatatctacggcggatgaacggatcaactgctcggctatttccaaggcctgctcaccgttatccggctgggagatccataggttctctacatcaacgcctaacttttcagcatagaaacggtcaaaagcatgctccgcatcgataaatgcggcgatacctccttttttctgagcctcggcgatcgcatggatcgctatggttgtcttaccggaagattccggaccatagatctcgacgatacgtcctttcggatatccgcctacgcccagcgctgcgtttaaagcgatagagcctgtcggtatcacctcgatatcctcgatgttttcatcgcctagtttcatgatcgaaccttttccgtagttcttctcgattttatccattgccgcacgtaaagcctttagcttatccgtgttagcggctggtttaccaccttcttctttcgctttttcttcgaacaaattttcttcttttgccatatgtgtcccttataaattaaggatttgatttgcatggtcttttgtcttcacctctttcggcccgatgatattagtaacaataccttcctcgttaatgataaaggtggtccggagagtccccatgtatgaacgtccgtacatttttttctcagcccacacaccaaactgttcttgtaaggtcgtgtctgtgtccgctattaaacggaaaggtaagttttgcttttgtataaagccttgatgcgatttggcgctatctttgcttactccgatgatctcgaagcctttcgcttgtaaggcttgatagccgtcacgtaagctgcatgcttccgccgtgcaaccgctcgtgttatctttcggatagaaatagagcgctacttttttccctttatagtcactcatctttacctctttaccgtcttgatcggttcccaaaaactcgggaaccttatcgcctatttgtactgccatattacaattctaagtcaatgttaaacaattcatgccaaggcaaaccttgctcatttagctctttcatgaatgggtccggattgaattcctctacattccatactcccggtttcttccaaatgccttgcataaataatttggcgccgatcatggcgggaacaccggtggtataactaacaccttgcgctcctgtctctagataagcggcatggtggctacagttgttgtatacgtaataagttaattccttaccgtccttgataccacggatgcggcaaccgatggaagtctcgccagtataattctctcccagatcacccgggttcggcaatacggcttttaagaattggatcggaacgatttcctgcccgttgtaaaggatcgggtcgatacgagccataccgatattttggatgacacgtagatgagtcaagtattcctgtccgaaagtcatccagaaacgagcccgtttgagggtcgggaagtttttggtcaaactttccaattcctcgtgatacatcaaatacgattctttcggtcctacattcggataattcaaggctttatgtacgcttaacggatcggtctccttccattccccatcctcgaaatatttgccacgttgagtaatctcacggatattgatttccggattgaaattggtagcgaatgccttatggtgatctcctgcgttgcagtctacgatatccagatagtgtatctcgtcgaaatgatgctttgccgcataggctgtatatacgccggtaacccccggatcgaaaccacatcccaagatagcggtaagaccggctttctcgaaacgatctttataggcccattgccagctgtattgatatttggcttcatcaagcggttcgtagttggccgtatctaaatagctaacgccgtattccagacaagcatccatgatatgcaagtcttgataaggtaaggccagatttaccaccaaatccggtttgaaggcgttaaacaaggcaacaagctcttgcacgttatctgcgtctacctgtgcggtttgcacttttacgttcttgatatcggcggcgatcttgtcgcatttacttttcgtacggctagctaccatgatatccgtgaagacatccgcattcatcgctattttcttaacagcaacggtacttacgccccctgcaccaataactaatactcttcccatttactaatagaattaatcttgttaatatacagtttacaaggttttcaaccaatggacaaatatacggcttttccttgacaatccctataaaagatttatttattcattttagaagggatgaaaggaaagaaagatacagctaatgaatgtgaatactgaaaatagtcgtacttttgtcacatttactgtttaaagtttggacatgagatttttaaattatgccgggggtgtttttattctgctcttattggcgttggggtgcaaacccgaggcgaagcggagccgtgtgcttgtgatccaatcttttcggtgggatgacaagaactatctggaattaaactcggatatccggaaagaactgagaaaaaaccgggtgaatgcggacatccgcacgttttatctcgattgtgagtgctatatggctgaggaggaagaggaacggatgtataactttatcgatacgatacgtctttggaagcccgacatcatattggtgaatgatgatcaggctacctatacgttgatgaaatgcggccatccttttgtaaagaaagttccggttgttttctctggcgtcaatttccctaattgggatttgctggaaaaatatccgaacgtaacaggtagttgggacaagattgattataaggaaaaccttcgtttgatcgatcagcaaatgggaaagtctcgcatttatatcaattatgataagacctccttagggcagttggctttccgggagttgataaaagcggtcgatacgagccgatatgtattgaattataatcaattggctttccaattaaatgacccggactttaaggtagattccatgacgtttagaaccgagatgagaatgaaggcgatacgtccttcgaaaaatgtaattcatttcatgccttttcgtaaagccaatggggagtttttattgagtaatattaatggtacctatccttattgcgtatttttcaatatccgttatgactatacatccgcaggtttgtctaagatgttcgtgactccttcatttacggcggtgcgggaaatctttaatataaacgtggaagttctgggaggctatttttgctcgaatcgcatacaagcggcggaacaggctcggttggcggctaaaattctttccggtacgcctgtctcttccgttccgatcgtagagagtcctaaagagtatctgtatgattggggggagatgcaacgtttaggtatctcaaaggaggaggtccctactaatgttcacatcatcaatatgcctatttctgaacggtataagattggggtttttatcgcctcttccttgggcgtgatcttattgctggcattgatcggttatttgttttatctctattggcgggaagcaagacgaaggaaagcggtgctcgctaatttaaagcaagagaaggagcatctttctttagcgttggaaggggggaatatattcgcttggaaattacagtctggtaccttccggtttgacaacgagttctttagctatgtgaatatttctccccgggaaattcctttggatgagctgtacgagatgactcatccggacgataggcagagtttgcgctccttgattgatttcatttgtacgggtacgatctctcatcatatccttcaatatcgttgcgattttaacgggaaaggttaccaatggtgggaatttcgttacggaagcttagaggatgcgaatgatgggtatgtaatcaatggcttatgtttgaatatccaaaatatcaaggatacggaggaggtcttgatctctgcgagggaaaaagccgaggagtcggatcggatgaagtcggctttcttggcgaatatgagccatgagatccgtacgccgctgaatgcgattgtcggtttctcgaatttaatgaactcggaagaggtcttggagccggaagagcgtgagcagttcgtgaagttgattaatacgaactccgacttactattgaaactgatcaatgatattttagatctttcccgtatggaatctggaaagatgagttttgttttcgatcgccatgatttgaatgtcttgatcaatgaaatctattgtactttccagttgatgatgcccgagggggtagagctacgcatgcgtgtccccgagatcccggtggttgtggcggtagatccttatcggctgaaacaagtattgtctaattttatcaataatgccatcaagttcacgacttcgggctatatagaagtgggatactatttctgtacgaaaggcgactgccttcatatctatgtagaagacactggtatcggtatccctgaggagaaacagaagcaagtttttgatcgtttttgcaaattggatgagtttgcgcaaggcaccggactcggactggcgatttgccaagtgatagcgcagcgtttcggcggtgagatacaattgaagtcggaatatggtaaaggtagccgttttatgctaactttgcctaaagaacgtataggttgacaaagcatggaacaaatagaggaactttcacgatttatcaaggaacatgcgtcggatgatttgaatcgtctgttgctttccgcctctcgttatccggggatcgatatccctttcgtggtggatcaattaaaatctcggcggcagatcaaggataaactaccttcatggtatcaaaacgatcgactggtttttccggcgaagatagcggcggagcaatgttcctcggaacagactgccttgtacaaacagaggttggtagatccacaggcacatgtatgtgatttgactggtggattggggatcgatagctatttcttctcccggaaagtacggcaggttacttatatcgaacgctttcccgcttattgcgaggcggctatccataatttcaaggtgctagacgttggtaacgtaacggtattgaatggcgattctacggagttgatagataagatcgatggaatagatgtgttttatatcgatccggctcgtaggggagaggggaataagcgggtttttgcgctgcaggattgcgagccggatttgacaaagttggttcctgtcttgtttggtcatgcccctaaggtgatcgctaaattatctccgatggcggatattcatatgacgttggatttgcttccggatgtgacagccatacaggtgctttcggtgaaaaatgaatgtaaggagcttttgtttgtgttggagcgaggctcgaaaggcgggagtcctcaaatctgttgcgtgaatttcacttcggaggaagagccggaattgtttgtgttctcattggtggaagaacgggaagctgtcgcttccatccgtggagaagtcaagcgttatttatacgaaccgaacgcttccatcttgaaggcgggtgcgtttaaagcggtcgccactcgctttggattgaataaattgcatgtcaacagtcatttatatacgtcggatgaggttgtccctagttttccgggacgttcttttgtggtagacgaagtgatcccctttacgaataaacaatgtaagaccttgtcgaggcagattccccaagcgaatatcacagtccgtaatttccccctctcggtggatgagttacgtaagcgaactaaaattgcggatggaggaactatctatcttttcgctactactctggaaaatggggataaggtacttatcaaaactcataagatataggatactgcataggtgctgcagcattactgcataagggttgcagtactactgctaggcctgttgcagtactactgtaaggcttgttgcagtactattgcaaagcctgttgcagtgatatccgaagggatataaaaaagtgtatgatgttatcaccatacactttttatgatatgaggtttatattacttcaatagattcgcacgcatttcctcaatcttagcttttgactcacgagccgtatttatggttgctaccattccgcttaacggagcgattgtagttcctaattgctccaagtcaggataatatttagctaagtcggctgtgatctgctggatgataccgatacgtttttccatattctcgctcaaaccggcggaaatagcgtcgcctttaacaaccaagcccggatttgcgtatacaatggcatattctacagccatgccccctaacaactcaagctcaacgtcagccttatcattttccatcatagcgtcgatcaatttgttttcttggtttttcatgaatttgcttaacacctctttgctggcgttagcgggagcggactctttcatgatgtcgatagcgaatggaatgtccagatccgtagtcaatttaaccaatacgttctcgatatctgtagtcggctttttcatagccttcaatacgttcaagtctgcgaagtagataccgcaagcacgtgctttctgggcttgtgtgttcaattcggaaaccttgctgaccggcaacataaaatcagtattagcgacagagatcgtaacctcgccggtagatactttgtaaggcaactccgaatccggcatatctttcaagaaacgagtaacctcgtctttcaactcggcagtaagcagacctttagatacttctcctgcgatagctgcttcttcctctactttttgctcagtggcgtcttgttttttactgctgttgcaagataccattccaaatgtaatcgctgctatggttagcaggctaacaaaactctttttcatgttattctttatttttagattatatattttgtcattaatcgctccctttgtttaaatacttgccgggaaactctgcgaagatagatataattaccaataaagcaaagattcctaacattaataaattaaatgtaaaagtagaaaatgtataaccggcgaattttttctcatgactatagaaaggcgcacgtccccaattattgtccggttccagataaatctgcccgattttagggtagatccggttgtgggcctccttatagaattgggtactggttgagttgagtaccagctcctcgatggctgagttatgatgttcctttttcaaggtgttcaaccattcggagccgtgttcttgaatgacctctttccgttttttctctaataacgccgtgaaattatcgctacgggtatgcagggctttttctactttatccatatagctctcgtaactctctttggacgtatagggggcgatacgggcggcacgggatagtacggccagttcgttgtggatcgtccgggtgttcttttcccgtttctccgggatcaggttgaggctgtttatgaggctgcgcacctcgtcagcatggacattccggtaatattgcgctaggaacttttctttctcgaccgtgaaaaataggcggttgtagctgttgttccggaattgttccgtaaccaacgcctcgaatgcccaacgtgagggaataacctcaccgataaggggcactatgttccggctggatgcgcttctgctcaaatcgtcgaacttgacaactaagccgcaaagtaagatctgcgggattaaaagcagcggtatcgttatatagatcgctacgatcgagtttagggattgcgatagtaccaaacctgtcaggttggcgaggaatgaggttgcccatagcgtgatccaccaagtaaggaacatctcgcttccaatgcctatcaataaatttcctaccactatgaatagcaaactttggatcgctgagatacaaagcaggtagaacatctttgacgagagataactgcctcggctcaatcgcaagaatcgttctcgctttaggagcgtccggtccttgatgatctcttcggcgctgatacttaatcccgtgaaagtagcgacaatcaccgccatgaaaatgtaggataccagatttttgttcgccagcaaagaatacccgtcatcgggtacgaagcgggtgagcagggccacgatcaccgccaataaaggagtctccagtaaggcgatgcacaagtactgcttattggtcagcttggtctttatgtttctttccaagaagatacagaattgcttccagatcgagggcttctgctgatgattcgggggcaggggggtaggcttaacctcttggaacttcgggcgggaagctacatataactcatgccattcttttgaagttatcttccggatgtttgtctggtttccgctatcgtctatcttttttgcgtcgataatggttaggattagttccggattgatatttccgcaggtgccgcaaacactgatgtcttgatctgtataattggcgatccgtttgaaataggtgatcgcctcgatcgggttaccgtcgtaaatcgggtaaccgccggtatctaataaccataggcggtcgaacagtttatagatctcggacgaaggttggtggatattgacaaccacgagccgtccccggtgtgtttgttcctttaacagcatgatgaccttttcggaatcggtggacgagaggccggaggtaggctcatccaaataaaggatcgccggctcacggataagttccagtgctatatttaaacgtttacgttgccctccgctgatcgttttccggattggagacccgacggccaaatcccggatcttgctcagatccaaatcctccagtatcgtattgacacgatcctcgatctcctttttggtcaggttggcgaaacaaaggcgggcggtataccatagattttggaatacggtcagctcctcgatcagcaagtcatcctgaggcacgaaaccgatcaattgcttgcattccggatcactcagcggatgtccgttcaggcatacatttccctctccggggataatattcccatttaagatgcttaacaaggtcgacttaccaacgccgcttcctcccatgatggctaccaactggccagattcaaggttgaaagagaaattgtgcataccgttctcgctattcttgaagctgaactcgatatccctcccggttaataaaatacgttccttatgctcattctgattgaatacatcgaggacatcactataataaaccggcaagaatagtgggcttttgattacgctgctgcgttgccagccatagaagataccggaagtaagcgggatatcgttcatgaatacccgtccgctgccttggtagataaagaccattcggtcgaaccgggtcagtctcaacacccgtatctcgccctccaacccccttctgtagatatggttgacgtctttatcgctatcatcagcgttgatcgtaagtatggagggggattttttaccgactacaaaggcgtataggttgtcgaaggtatccgtatcgatattgaatatcgtagcgatcttatggaaaatggctaagttctcgttcaatccttcattgttgccatgggcgaactccatgaaacggagaagaagcaatagttggtcttccgcgatcaatttgggcttgagctggttgcatacgttaataataacgctttctctatcgatgtcgaactccgggtcatcgtaaacactttgtatctcttcaaatagctccatatattctttatgggagcggataccaaagtgactggttaagtaagaattgacagcttgacgtgcttgatcactttctatttttgccaaggacgcaaatatagcgaacaagtttagtagcccattgagtatagtttcattcattcatcaaagtattgtttcaaatgtcttgcaaagataaggtaagtgaaacaaaaaacaggtcgaatgttagactttttaagcggtcaagtgaataacatgatcaataattgggcagaaatcacccggatgaacatggataacgggtaaaccgtagcgtaagatacggaaggctcgtcaccctcgacggtcgtattggcataactcaaggccatcggattggccatgcttccgcatagcatacctatgttgtgggcgtaatctaacttgaagaattgcgaggcgatgaacccgacgatcaagaccggtacgatcgtcaataggaaaccgagaccgatccataacaatccctcggcacggaagacggtctcgaagaaatgagctccggagtcgattcccagtcccgccagatagatcactataccgaactgccgcatcatcaggtttgcgctctgggtggtataagtcgttaggtggaaacgggggccgaacgcacccatcaagattccaacgatgatcggtcctccggcgatacccagcttgatgggggtactcattcccggtatggcgattgggatcgccccgattaatacgcccagcgtaagtcctacgaatatggcaagcaggttggggttatccagccgtttcagctcgtctcccaatatcttacccacgttattcacggaattggcctcgcctacgatcgttagtttatccccaatctgtagacggaggtcacgggaggccaccagatcgatacccgcacggtttacccgggtgatgttgatcccgtataggttgcggagccggagcgagcctagctttaccccgtttacccggttgcgggttacgacgatacggcgggagatcaattggctgtcgatagcgttccagtcaatatcttccttattccagtccgtagtctcttgttctccgaaaagtaccttgatggattcgacatccgcctttacggatatgataagcaaatggtctttttcctttaagatggtttcagaggtagggatcgtcacctttccgttcctccagaggcgggagatcacgaaatgtttctctgtcaatttcatgacttgctggatgctcttattgtaaatagaggggtttaatacctgaaattccgctacgtttgttgtcgtgtcttgctccttatgcgtgttctgtgtctttttagcgaataaggacctcaagatgataatagcgagaattacgcctacgacacctaatggataagctacggcacaggccagagccatatccgttacgttcctcgtattttccggatccatttgtaagagcgcttgctgggcggcacctagggccggggtattcgttacggcaccggatagcaaccctaccataacggggacggaaattcctgttatccaatgaaacaccaacgtcaaaatcagtcctaaagcgatcacccctaatcccatcgtattcatttccaccccgcctttttttagggaagagaagaaaccgggacctacctgcaatcccaaggtatatacgaaaacgataagcccgaagttctgagcgaagttcagcatgtccttatttacggtaatgcccagatgccctgccataataccggcgaagaatacaaaagtgatgcctaatgaaatgccgaatatctttagccgccctaaatacacaccaaccgccgccacgatagaaatgacggccacggcctgtatcatcgagggttctgtaagcgtctcaagtaaccaattcataagagtttcttttttgctttagaagcgcaaaaatatataaaacaaagcaattaaaaaaattgtagtatctttgcccacgaaataacgatgatacagggtgagggaaacgatggttaaatatataaagtggttgctgccggtactttttattgcgtattatagcagtgtctcgctttttacgcacgtccatgtggagcatggtacgaccatcgtgcatgcgcaccctttcaagaagacggcggacggtacttgccatcatcatacctctttggcggagatacagttgtttcatatgctctcatctattcacgtgatggacggggcgattcacctgttacgtttacaattctattctttaaaaatatctaatctctctgagtctccggtctatccggatcatgtcacttccgttgagggactgcgatacctgcgggctcccccagttgtttgattacatatccagaaatcaatatccgtttgtagagacggggtatgcccgtctcctcggcaattcgtaatcattaatattcaaacaactattaatcaagcaatgaataagttcattacacttatactatgcctgtgctgtgtctttacatcagcgtgggcagagggagacgatcatacctccctgaatccttccgacgctaatatcgtaggccatatcctcgataagaaaacaggagagcatctctcttttatcaatgtctacctccacggtacgacgatcggtacgaccaccgacgctaccggtcattactatatgaagaatcttcccgagggaaaatacaccttggtcatgaagtctatcggatataaaaccgaggagaagacggtgacccttaagaaagggaagacgttggagatcaatttcaatgccgaggaagacgctgtctccttggacggtgtcgtcgtatcggcaaaccgtaacgagacgacccgccgtttggctccttccttggtaaatgtactcgactccaaggtgttcgagactacgcacgccacttccttggccgacggtctgaacttccagcccggcgtgcgtgtggagaacaactgccagaattgcggtttccagcaagtgcgtatcaatggtctggaaggcccttatacccagatcttggtggatagccggccgatcttcagcgccctgactggcgtatatggcttggagcagatcccggcgaatatgatcgagcgggtagaggtgatgcgcggaggaggctcggccttgttcggctcgtccgctatcgccggtacgatcaatatcatcacgaaggaaccgatgcgcaactccgcgcagatcgcccattcgttgacgatgatcgggggaagccgtccggataacaataccaccgtgaacgcctcgttggtgacggacgatcataaggcgggtatctacctctttgggcagggccgccaccgtgcctcttacgaccatgatggcgatggctactcggagctgggtaagttggaggcgaagaccctcggattccgttcctacctaaagaccagcaactactccaagctcactttcgagtaccataacatcagcgagttccggcgaggtggtaatttattggatcttccgcctcacgagacggatatcaccgagcagaccgaccaccagatcaacgggggaggcctgaaatttgatcttttctctcgcgactaccatcatcggctgaatgtgtacacctccgcccagcatacgaaacgccagagttattacggtgccggaaaagatccgaacgcctatggtaacacgacggacatgacctttatcggtggcgtccaatattcctacgaatgggataaatgcctttttatgcccgctacctttacgggaggcgccgaatatagctacgatgatctgcaagacgagatgcttggctatcaccgtacgatcgcccagaccgtgcatatcggtagcgccttcgcccagaacgagtggaagaatgaccgttggagtttcttgatcggtggccgtttggataagcataacatgatggatcatgtgatctttagccctcgtgcgaacgtgcgcttcaatccgacgaaggatatcaacctgcgtatgtcgtactccagcggtttccgggcccctcaagcgttcgacgaggatttgcatatcaccgccgtggggggcgacgtggcgatcatccagatctctccggacttgaaggaggagaattcgcagagcgtgagcgcttccgtggatttttatcatcgcttcggcccggttcaagtgaatttcttagtggaaggtttctatacggatttacggaacgtgtttatcttggaggagatcggccgtgacgaggacaataacctgctgatggaacgccgtaatggaaagggtgcccgtgtgatgggtatcaatctggagggtaagatggcctattcttggatgcagatacaggcgggtgctactttgcaacggagccgctacaaggaggcagagcaatggagcgagaacccgaatatcaccccgcagaagaagatgttccgctctccggacgtatatggctatttcacctctaccttcacgcccgtgaaacgtttctccgcctcattgacgggaacctatacgggcagcatgttggtgcagcacttggcgggttacattcccgaggatcgtgaggagaagactcgtgatttcttcgacttgaacctgaagctgtcttacgacttcccgatcttcaagtccgcaaccttgcaggtgaacgccggaatacagaatatcttcgactcctatcaagatgatttcgacaagggagcgcatcgggatgccgggtatatctatggcccgggaattcctagaagttatttcgtggggtgcaagatcagttattaaatactcggcgagccttgccgagggagttggaaggactttgaagcatccggcggctatcgccgggggatgtggaagactcttgggatgcccggcggggggcgccggaggatcggaagggaactcaagatgcccggcggagatcgccgcagagttccaacccgtttccaatcctccggcgagcctctacggggctattcctccactatcctctctatataattcggcggcagggtggtgcgtggtactttcatgccgccgaaccatttatgcaagggcaagtcgaagcctgttccattcatgtaattgtagagggaaacgcgaagcccctcgctgaaaagctccggatcgcagccggatagcgcctcgaactgtacgtcattacgggcgaatccgccaaagggaggctccgtgacacggcaactgtactcggcggggtgcaaccccacagggctatgcgctgtcatggcgaaacgatgccaaaatccggattgaatcagcccaagctcaaacatttgccggaccgtttctaaggaatctatggtttcttgagcggtttgggtcgggaaaccatacatcaaataggcatggaccatgatgcctgccccggtaaagttgttggcgacccgtgccacttgagccactgtcacccctttatttatcagcttgaggagtcggggagaggctacttccagacctcccgacacggcgatgcagccacttcgttgaagaaggtcgcatagttcctcagtatagcttttctcaaaacgaatatttccccaccacacgacggttatcccacggcggataatctcctgcgccatttcccgtagcaaggcgggtggagcggcctcgtccacgaaatggaagccgatctcgccggtttgctcgatcaagcgctccatacggtctaccaaagtcttggctgtattcggctcatatcgtttgatgtaatccaatgagccgtcacagaaggcgcatttcccccagtagcaaccgtgcgccaaggtcagtttattccagcgaccatcgctccaaagcttgtgcatcgggttggccatttccatgacggagatgtatttgtccagcggcaagccctcgtaatccgggaatccggtctcgctttgccggcaagcggggtaagcgggattatcttgataaacgacccggctaccgttctcgtccaaggagaaggtgcgtaccagttcctctttttggatcgccccgtccagatagcgtaacacttggaagagtgggtcctctccatcatctagcaagaggtaatcgatgtatttgaagaagcgtgtatccgtgatggagcgaagttccgtattcacgaaaccacctcccataaggatcgggatatcgggatgtgcctgccgtagccattgggcgagccggagggtactgaataaattccccgggaaaggtacgctgaaagcgatcgccttgggcttgctcttggcgatgtgcttttccaatagcggttgcgtcaggcggtcgataaagccgaaaggtttttggagggcttcctcgatctcgtcgaaagaggaggcgcagcggcccagatgctcggcatatcgactgaagccgaaatccgggtcgatcgtttccctgatcaagtcgcagagatcctccagatacaaggtcgccagataacgggccttatcccgtaatcccgaagtgccgaacgcccattccagctcctcctcgttttggctcctgcggtcgctttcgggaaggtaatcttggttacagatgcgataagcgagaggatcgttctttccctgaaggaaagcgacgacggcggctatcgtgtcgatataccgttgcttattagctagcatcccccggactttagccggatatttacctttccgtcgctcgatctcggcgaataactccccgagaccctgcgtggaaaacaaagccaagattgtctcgatacccagatcggtctgcccggcatgtacaccctttgcctccaaataaccttttaggtaagccgtggaaggataaggcgtattgatctgcgtaaacggagataaaaccagaagaaccgaagctaatcccatatcaactcaactaattttcaattattcaagctattgttgatagactcgatatagtccagaatctcatcccgtccctctttcttctccgaggaagagaggaagatcggaggaagctcttcccaagtctccagtaatttatccgtatagacttttaggttctctttcaagcgtcccttgctgatcttgtcgatcttcgtgaagatgatagagaaaggaaccccgctctcacccagccattccataaactccagatcgatcttttgcgcctcgtgacggcagtccaaaaggacaaataggttggtcagttgctctcgatcgaggatatagttctcgatgatacgtttcaattgctcccggttctccttgcctcgttgggcgaagccataccccggaagatctaccagataccactcgttattgataagaaaatgattgataagtaaagtcttacccggtgtttgcgaagtcatcgccaagcccttcttgttggtaagcatattgatcaaagaggatttgcctacattgcttcgtccgatgaaggcatactccggcttattaccctcggggcatttccttacgtctgtgttgctgataacaaattctgcgcttttaatttccataaaatataaattaatgaataatgagtattgaataatggctaggtttaattctcaattttcaaatttccattttcaattgccgaaagccacagcccggcgaacgtgatgcctccgtttaccataagcatctcgtagccgaacgtatagcctgcgtattgtttcaccaagaaatccgtggcgaggcaaatcaacggggaggctatacagatatagggcacgtatttgtcacgggggttccgcttcgtgaaaagcccgaaaacaaacagccccaatagaggaccatacgtgtacgacgctatcatgtagatcgcgtcgataacactccggttatttacggccttgaacgccaagatgatcaagacgaacaagacggatatcatcacgtgtacctttaggcgggtacgtttcgcccttttcgcttcctctctctgcacgccgaggatatccacgcaaaaagaggtggtgagcgctgtcaacgccgagtcggcgctactgaaagccgccgctatgataccgatcgtaaagaagatcaagatactcccgcccaagatccccgaggtacaaaacatcgggaggatatcgtcgttgagggttggcaactggatgttctgctgtgccgccaatgtcagtagcagtacccccagtgcgagaaacaagaagttgaccggcgtgaaggcgaagccatatgtgtacatgtttttctgggcatccttcaagctcttgcaggagaggttcttttgcatcatgtcctgatccagcccggtcatgacgatcgtgataaagataccgctgaagaactgcttgaagaagttctgcgtactatgccaatcgccgaactcaaagatccggaaatgagggctttccaccaaggtctgcgccatatccccgaaatccagtcccatcttgtccttcacctgccagatgatcacgatcaacattgccacgagacaaagggcctgcaacgtatctgtccagatgatcgtcttgataccgctccggaacgtatatagccataccagcaggatactgaggatagcggtcacggcgaatgggatgttccaagcgttgaacacgtaggtttgcaagatcaagaccactagatataagcgtgcggccgcccctacgatcttcgagagcaggaagaatgaggcccctgtcttgtacccccttctcccgatccggtcatccagatacgagtagatggaggtaagctgcaacttatagtatagcggtagcaataccttggctataatgatatatcccacgaagaagcctaatacagtctgcatatacgtcatatcgatcgcccgcaccatgccgggtaccgatacgaacgtcacccccgataaggatgtccctaccatgccgatagagacgatataccaaggtgatttcctgtccccgaggaagaatgcctcgttgctgttattacgccccgtgatccatgctatcagcagcaagacggtgaaataggcagcgataataaaaaggatgatatagctgttcatgtattgctaacttctttctttttctccacaaagatacggctttactttgaaataacgggcatatgcgtggattctaccgtgatgggtttcttgatgccctttaggtagtccatgaaagcgtcggtcgatatgatacctaaattatcgaattccgggatctcgtagcccttgaataaagaggcgtcgtacccgtctccgccatcggtgatgaaagcgtctagggtcaccacgcaaggggtattgtcctcgatctcggtcttttgcccgtctctcgtatagactattttctcgatcttatttccgcttagggtaagcgtgaggtcggaggattgaaggaaaccgttcggattcttccgtccatcctccaatagcttcttcaaccgcttgccgtcgaaacgataggcaacgatagcggagccgaaaggcaagatgttgccggcacgcagtcgggtgatatctcctttcgggagggccgcacgtatacctccgtaatggtttacgccgatcaccggctgatccttgtaagcgggcatctctttttggaaacgctgggcgtaagcggccgtgaccaacgccccgataggcgtatagtcgaacttattgatggtacggtcgtggatcaaggcctcttttgccgtggcaagtttctcgttcagccgatatttatccatgatcttctccacggcctctcgcatctccgggttctcctcgcaggctacacgcacggtatccccttggatgaaagagatatcccggtgtccgttgaaatcctgtatctggaacagcagtttcccgatatgggtaccgtttacgccggcttggatgatgggaatgttattgatcttatcgagcaccagctcatgcgagtgggcggatatgatggcgtctaccttatcgatgaacggcagtccttgggcgttctcctcggtgatgcggtaaggcattttcatatccgtgccgatgtgtatcaagaggataatcatatcgatctggtcctctttctttaactggtagacggtttgtatgcacaccgctcccagcggatgcgtgaactgaagccctttcaggttctccggcttggtcttgacgtaggtgtccgtcgtggtcagtccgatgaaggctatgcgcagggaggagccatctttcaacttacgctctacgatacggtagggactcaaccagttggggtgagtatatctcttctcttcggtgatattggcggccacatgggggatattcaaggcggcggtgtccactagataagaaagtccccagtcgaactcgtggttaccgatggcggacatttccacgtccatcgcctcgtacatttctttgataggctcgcctttcgtgatcttggagaaatagcttccgctgaaattatctccgcctgagacaacgatggaatgcggatagcgttgtttctcgttttgtgtcatttgtaccaaccgggcggctcccggcgtgatcccgtcggaggcgaaagccccatgaaaatcgttgaatgagaaaatggctaaagtgtctatcgagctggacggggtggcgatatcttgtgcgaataggggagcggttagcgcgctgcctagcaaaatcgctgatacgaattgttttttcagtcccatggttgtatgtattaatagggacaaaagtaggaaaaataacgagattcaccgaggaaaacgcccgattcgtcgaattctttttgatcgttttaaaccttcggcctacctttgtgtcatagtaatagctcgtgagagtgaaagcgaaccggttgttcatcataaccgggaaataggtaaacattaagtcaaagggccgccgtccggataagatgcggcccttttgatttattcggacttgaggttgtttacgggattgtcgtgggtggtacggaatacgttatatccggaaaccgccagtatgacggtgagtaccaatacgcctcctcccacgaatagataccaggatagctggatcttttccgagaattgttcttgccatttttgggagatatagaaagcgataccgcaaccaagtaagatggccggcaatgctatggtgatgatatctttcaagaaaatatggagtatgtcttttaccgtggctccgttaatcttacggatcgccatttctttccggcgacggttcacctcgtcgttcgtgtatccgatcaatccgatgaagacgatcagcaaggtgacgatgccaccgatcatgacggaatcacggaatttccgggaggaggtgtatccttccagcatctcgctcttgaaggagatcacgttgagttctttatccgggatgagttgccccattagatcctgtgtcttgcgtagggcctcggaagaaaggctatggtaccgaatgaccatatgttgggccgcccctttcgtatagaacatgatcttggctcgcggatcttctcccgctatggaacctaggcggaaatcctcgaatacgccccggatcgtgaagagaggcatcgactcggacttggtatcgtgtccggttatttgtaccgtcttgcccacggctccatccttccagtcggcgaaaggtttcatgtattcaatgaaattgcggctcaccagtatctcttgcgaggaggtggtattctctgtgaagtattgtccttctacgatcgggatttccaatacgttcaggtaatcgtttcctacgtcgtagagatcggcgatgttgaatagttcccggtcgtctcccggaagatagacattattgcccgaggctccccagaaaggaaggttatagcaagtcgtaatggcgtctacctcgggcaatctctgggtttcctcgatcagtttggcacgccccgtggagtctacggcaccgatatacacataggcgaggttctcgggattgtatcccggatgatcattcaccatatggtcgtattgcttgcctaccactagcaataaggaggcgaggaagctgattgccgtgaactggaagaacaagagtcccaatttccaaaggcggcgtgcctcacggatgctccggaaaacagccgctacaggaatgcgtcctaagaaccagccggtagctatgcccgtagagatcagtacgactatgaccgtgaggcatatcgcccacatacctgtggataggaataacgatcggactcccgtgccgatcagctcctttatagttccttgaaatcctaggatcagaagtacgacgagcgctagcgcgacggtgacgtgggtccctacctcggacaacgccataccttggatatccttaccgctcgccccgtaacatttgcgtacggccatctctttcgtgcggttcacgatggaggagatcacgatcaatatatagttcattacggcggtgaagatcaatacgaaggcgatgaacgagaggatcaaggccatacgtttggccatatcgtcctccatatgtacgttgagtagtttgtggaaggtgaaagtcagttccacgccggctttcttaaggtcgtttacggggaaatgcttgtcgatcatctgtctcattcccgcttccaactgggcctctgtcgtacccggcgataccttgacgaaactttggtagcggtcgtttccggttaacatatgggttccgtcccacatgaacttgctgatggaagaaagggatacgataatgtcataactctgttcggtgttgtccggtagtttcttgaatacgccgcctatcgtgagggcttgtcccggcgcgtcgtcaatctcgaagcgttttcccatcacgttgccgccgatacgttcggcgatctcgtcggatacgagcacgtacatgggttgggagagaacttgcttagggtctccgatgagcatggggcggggcaatacgtcgaaaagacaactgtccgctaggatgaaggtcgctttgagccgatgcttgttgtcggacatcgtaaaaggggagtttccccggaagtacgtatagcgtgtggcggcctcgatctctggtgtctcttgtttcaagagggggattactccggcgggcgtttgcccgtggtcgcccacttccccgttcatgaaaaatttctcatatactcgatagatccggtctccgttcgaatagaagttatcgtaggtgttctcgaagtggactttagcgatcagcaccaagccgatggtcagtcctatacccaaggagataatcttcattacattgtgttgccctctcttaaaaagggagcgaattgcgatcccgatgtttttcatattgttattgtattattttccggtaagataaaatcaaataccgtgccattgtgtttatgtggttgaaaaacagaggggtgagtggcgtacgattgtttatgagtgtccaataattggacaagggtgtccaaaatctggacacccttgtttaataccttttctcaatagaggctccggggaaataatgcgtgaggattttccggtacgaatatcctttggctcccatcacggcggctccgatctggcaaagccctacgccatgtccccatccggctcctgtcaagatgaagcgggaggggatatcaaggcggatatccttcttatcgacaacaaaggccgagctgtatagatgcgtctcggataatgtccggcgtatctcaagctctttgccgatggtgaacgaacggcgtacccctacgatcttgagtttcgtgatgcgtccggacgaacctctttccaacggtatgagatcgatgatcggcccgaaatccatacccgttttccggtggatcaaccttgatagttcctcctgcgtatattctaccttccaacggtagaaatccgtggtctcttgatcgtagttgtttagcacttggctaaggatctccttgtccgttgtattacagaaggcttcgggtgaggtacgtatccattgttccgcttcccgctcgtccgtcaagtcgggataggagggaacctcgtcatccctcaaggcggtaagataggagtggggaaccggttcccagcaattctcgaatttctcggtcacgcctccgcagcatttcgagaagcgggcgtcgcagatcgtatcgttatccatcaatacctctccacgtgtctctttgatcacctccctgactatcgggttcgatgcccgggtaataccttggtaacgctggcaatggtcgtcggcacagacatcgaacagatcatggtcctcccggtcgtaccagcggatcaaggtctcgttgttgcggtaacaacttttatagggcgtaaccgatccgttcaagttgaaattcttctcgacctgtgccaagagccagcttcgcgagatcacggcatgggctttcagcaactctttggaagcgttggcgctcatctccgaggagattacgctggtaaggtattcctccacgtccacttggttgatcgtgacgatacctttatcggtcgccacgaggttcaacgctcccttgaagcgttgatcctcctgtcgttgccagtgaaaatccacgccgatcgtgaccgccttcaagtcgaaagaggattgcgggctggtcggctcgaagaatagctcctgataaagcttcccattgtacacgatcttgccgtttacccagagggcacgttgctcgcctatggtgaacgtgccggtttccgtatgtacatactcctcgttaaaaacaaatgagattgctttgtgggtcatgattcccacattgattacaggtgcttccatatccttattcctttattctattcttttttcgcgttcagggaattaaatgtgaggtaagcgatcatgacaaggtacatgacaaccgccagtatctcggcggcattgctagatgcccattcctcgttcatcaagttgattccgccgaaacgtaaggccgcgctaaccacgcccatcaaggcaccgccggcgataaagccggaagccagtaacgtacctttctccaagcgggctgagttcaagctttggtctttgctacggcttcccacgtaccaactgatcgctccaccgatcaaaagcggcgtattcaggtccaaagggataaacatacccaaggcgaatgccaacgccggtatcttgcagaagttcaatacgacggcgaggacggctccaatcgcgtataaagcccaaggtgcccccgagccactcatcaacggctcgataacggcggccatagcgttcgcttgcggagcggccaattgtccggtcgtgaaaccgtacgtctggttcaatatcaagatcacgcctcctaccgtagcggcggaaactagtgtgcctaggaatttccaagtctcttgcttggcgggcgtactacccagccagtagccaattttcaagtcggtaatgaaacctcccgccatggaaagcgccgtacaaaccacgcctccgataatcagggcggataccatgccggccggccctttcaaccctacggcgaccaagatgatggaggcgaggatcaacgtcatgagcgtcatgcccgataccgggttcgtccctacgatagcgatagcgttcgccgctacggtcgtaaaaaggaaagcgatcaccccgaccagcaataagccgatggcggcatggaaccaattatgaagtacgccgaactggaagaacaggaaggtgacgatcagcgatacgatgataccgatcgttatcaccttcatcgacaaatccttttgcgtacgtatggtattactctccacagcgtctccttttcctttcaactcgttcgccgccaagcctacggctcccttgatgattccccaagagttgatgatgccgatcaccccggcggtagcgatacctccgataccgatgtggcgggcgtaggtggtgaagatttgctcggcgctcatgctcccgacggtcgccgtgatagcgtcatttccgaacgtaagcacgtcggcgctgaaaatggcggacatggcggggatgattaccaaccataccaagaatgaaccggcgcagatgatcaaggagtattttaatccgatgatgtaacccagacctagtacggcagcgcccgtattgactttcaatacgatcttggccttctctgccagcatctcaccggctccgacgatacgggtactgatcgtctcgccccaccaaccgaaggtggcgatgatgaagtcgtacaaacctccgattaatccggcgaagatcaagggcttcgcttggcttccgcctttctcgccggagacgagtacttgcgtggtagccgtagcctccgggaagggatacttaccgtgcatatcggatacgaaatatttacggaacgggattaatagcaagatcccgatgatacctcctaacaaggaactcatgaaaacctcgaagaaattgaccgtgatctccggatatttgtcttgcaggatataaagggcgggcaaggtgaaaatggcccccgccacgatcacgccgctactggccccgatagactggatgatgacgttctctcccaaggcgttcttccgcttgaatccgctggacaaccctacggcgatgatagcgatcgggatggcggcctcgaatacctgaccgaccttcaggcccagataagcggccgccgcgctgaatatcaccgccatgaccaatccccaaaggacggaccaaagcgtaacctccggatagtgtttgttgggagacataagaggcttgtagctttccccttcttttaattctcggtaggcgttttctggcagcccggttaccttttcttcattttctggtttcacgatattaaaatgttagattattagttcgtaatagctccaccaaacgggtgttgggtgacaaatttatgttttctggctgagacatgcaaggattctttagaatagttagggcaaccgtacccaaattatctatatgaattcttacccagtagcgtatgaattcttgttcgcatgctgtataattctataaaccacggcgtgatctgtacagaccaagtcgtggaatatataaatcacgtcgtggtctgtacatcccacggcgatcatttggaaatagatcaagtagcaagtatgtttgtatatggcaaaaagaatgtttattacttgaggacatgaacaattatacctagagcagttatagttgtacatatcaagcaagagatgtgcgacttgaatgggatgggggagaagccgagtaaataatttgaggtttatcgttaattcgtaaattctttctatttttgtagtcaaatacagaaagtagatgaatcaaagatatccttcagccttgttggaaaatgccgtgaatgaattggcttccttgccgggggtggggaggaagacagcgctccggctagcgctttatatgttgcgccgggacgtcggctatacggaaaacttcgccgcggccttggttgccctccgtcgagacgtgaagtactgcaaggtctgccataatatatgtgatgatgaggtttgctctatttgcgccaaccccagccgtgaccattccttggtttgcgtggtagagaatatcaaggaggtgatggcgatagagaataccgggcaattccgtggcgtataccatgtgttgggcgggatcatctcgccgatggatggtatcggaccgagcgacttgcgtatcgacagtctggtgcgacgtgtggccgaaggtgaggtgaaagagatcatcttggcgttgagcactaccatggaaggcgatacgactaacttttttatttaccggaagctatccggttacgatgtgaggatcagtgtcatcgcacgtggcgtatctatcggtgatgagatcgagtatgccgacgagatcaccttaggacgatccattatcaatcgtactgagttcaatctcacctcttctaattcataatcataactcataattaatatccggaatgacctacgaagaaaccaagttgtccgttatcatcgttaactataacgtgaagtattttctggagcaatgcctctattctgtccgtgccgccgtaacggggatggacgccgaggtgttcgtggtggataataactcgacggatggatctgtcgaatatctccggcctaagttcccggaagtggttttcatcgagaataaagataatcccggtttcgccaaggccaataatcaggcgattcgccagtgcaccggggaatacgtgttattgctgaatcccgataccgtggtgggagaggagagcctccgcagcctgtgcttccaaatggatgaggatccggagatcggagctatcggcgtgaagatgctgaatgggcacggggtattcttgccggagagcaaacgggctttcccttcgccttgggtgtcgttctgcaagatattcggcctttcaaagctgtttcctaactctccggcattcgcacgttatagcctgccgtatctggataaagagcagacgcataaggtggaggtgctggcgggtgcgttcatgttgcttcgccatgaggcgttggataaggttggcttgttagatgagtcgttcttcatgtatggggaggatatcgatttgtcttatcggatcgtgttgggaggctataagaacttgtacgtgccggaacggatcctgcattataagggggagagtacgaagcatggtgacttgaggtacataagggctttttacggtgccatgttgattttctataagaaatattatccgggagccggttggttgatgcggatactgatccggttagctgtcctgctgaaagcttgctgggcgatgatttcagcccctctacgcaagaaggctaaagcggttaagcatcgccgccttttgatcttgtgcagggaggatcattttgaggaggtaaaggccgtttgcctgaaagctatgccggatctggaattcgtgaatctctgggatttggacgtggagcgtgtgatggatgctatctgtcgcaagaaccagatgaaaggctttacggactacgctttctgcttccccgatgcccgctacgagcagatgctcttgttcatggacaagctcgtgaacaagaaagcggttttccatatatatacgaagaagagtggtcggcttgtttaagtaatccttgagtaaatatgttgttgtcgaatgatagagtccgtttgagggcattggaaccagaggatctggagttgttgtatcgttgggagaatgatccggagttatgggaagtagggaataccttggcgccctattcccgttatatattgaaggaatatatagcgggtagcgaccggagtatctatgagtctcgccaacttcgcttcatgatcgaggaatgcgatacggggacttccgtggggatcgtggatttattcgattttgagccgcatccgaatcgggcggcttgcggtattatgctggaccgtaggtatcaaggacgtggcttcgctacggaagcgttaagactattgatggaatacgcttatacgtttttgaagcttcatcaactttatgtgcatattcccgtggcgaacgagcctagcaagaaattatttacccgtctgggatttgtcgaggcggggacgcttaaggactggatcaggacaccggatggttattccgatgtctgcataatgcagttaatttaaatacgggtccttcggatattttgtccaagttttataatcattgcctaataattctacggaatctttccaatagccctccccgtcggcagacaggatattatcggtggtgatatggcttacggcccacgagttccgtttgatttcatggtttaattgcccttcggtccatccggaatatcccaagaaaaacttcactttcccatcgattgggtgcccgttgaggatgtatcgtttcaatgcgttgaaatccccgtcgaaatataaataatcattgatctttaacgcgtccggaatgatattatcccctaaggaatgaataaagaacaaacggttggggctgaccggcccccccagataaatcggtatctccggaaattcggcaaactccttgaaaaaagagtttacgataagatccgtttttttattcaagacaaatcccatcgatccgtgttccgtatgctctattaataatacgacggaacgttggaaataggcatcttgtaaaaaaggctcggcaatcagaatacttccttgaataggaaggacatcgttatgtgttattttaaatatatttttataagatgccatgatcgtgaatgttaggttgttactaattcaccgacaatataaggcgttttttaataagaagcaaatgaaaagcccgggattcaagttaataaacgtgaaccgaccgggcttattgttaatttatgcttgatgattttcctcgaataatctcagtctttcgtccagcaaatcatattggtgatcttttatgaaagaggtacaagcccgtagtccttgttggttactgcctgtggtacttaatgatatggcgcttactccgtaataaaccagctcttccatcaattgtccgccggtcattcccgggtaaccgatcgtgaaatagaaaccgtcggctatcggttggtccagatcgtgatcataaacgattgtgaaaccatgatccgtaaaaatcttctttagtttctccgcacgacgtccgtattctttcacttgcgagacaaagtcgaacgtaccgtccgcggcggccttgaacatggcggctaaggcgaattgggcggagtggctggttccggaagatagggcgtataagacacggtggatatataccgtaccgaacgtaccgcctccataacgctgagtcaatcccggataggagcgatggtaaagtttattggagatcgctgtcacgccgatacgctgtccggcatagctgaacgctttggaaccggatatctgcatgatataattatcggtataacgggctacgctcgcttggtaaggaggctcgaaaggacatccgaggtccttgcggaaatccatggcaaaataggcgaggtcctctatgacaatcacgtcgtatttgttggccatctcgccgatgatcttcaactcctcgtcggtgaggcaaaaccaagccggattgttcgggttggaatagatcatcgcagcaatattgcctttggaaagatgcgcttccaaggcctcacgcaatcgctcgccacgatattcgtatacgtcgaacgactcatatttatagcccataacggctatttgctgtttctgcacggggaatccggggtcgataaacaagatggtgtcttttcccggcgtacattgtccggccgtaaggaaagaggcgtatgtgccctgcatggaaccggttacgggtacgcaacactctgggtctatatctatatttataaacgccttgataaagcgggaagcttgctttttcacttcgggagttccgttgatgttcgggtagatagacgctataccgttacgaagggcttcgatctcagcgtctacgcctacttgagcggctttcaagcccggtacgcccatttccatatggatgaactcggttcccgtttcttgttccaattgcgtggatatggcaactacctcccggatagtcgctttcccaaaatcgggaagtccaaagccatcgataatccgtctggctgtctgatagtctacaggagtatttttcatgctagtgttaattatatatggggacaaaagtatgaaatttatcgatttgttctaattttttcatcctaaactattgctaattcaaaaaatccacctatctttgcaccgcaattcaacggaatagcgataaagaataacattttggtctggtagttcagctggttagaatacatgcctgtcacgcatggggtcgcgggttcgagtcccgtccagaccgctttttatttctccttcctccttttcaatattcctttcgtacatatttttcaatacgatatcatccggcttggtggattttatctgatggcatgaggctgttagatttggaatgtttatctttgcgataaaacagatagccttatggagaatctaataaagatcgataccgtcgatcaatacaacaagatgtttggcttggagacgttgcacccattggtgagcgtggtagatttatccaagtccgagacatggcctactaatttccgggttaattatggtatatacggacttttcctgaaagatacgaaatgcggggatattcggtatgggaggcaatattatgattatcaagaaggaaccgtagtaggattcgctcccgggcaggtgacgggtattgagcttaaggatgggacccggcctttggcgcatgggttgcttttccatccggacttgatccgtggtacggctttgggacgggacatcaagcgttattctttcttctcctatgaatcaaacgaggcgttacatctctctgaggaagagaaggggatcttcgtggattgcctgaggaaaatccagatcgagttggagcactccatcgacaagcatagcaaacggctgatcgcgatgaatatcgagttgctgctcgattattgcctgcgtttttatgaccgtcagtttacgacccgtgcggagacgaataaggatgtgttggtgaggttcgaacgattactggatgaatacctgcaaagcgatctgttaagacaggaggggctacctactgtacggtatttcgccgagaagatttgtttgtccccgaactatttcggtgatctgatcaagaaagagacagggaaaactgcccaagaaaatatacaagaccggattatttccttagcgaaagaatggatattagggacaaacaagaccgtcagccaaatcgcttacgacctaggattccaatactcccagcacttcagccgcatattcaagaagaccgtggggtgtaccccgaatgaatatcggaaatcccagatgtcgtaatcggtgttacgggttattggatgtattttatgaccttggcgggaacacctcccacgatggcattgtccggtacatctttagtaactaccgagccggctccgactatagcgttctcgccaatggttacgccggataggatcgttgcgttcgagcctacccagacattctttttcagaacgatcggggcagggtaggtagtgctccggtcttcgggggcgaagccgtggttgagggtggcaaagaccacgttatgcccgatctggcaaccgtcgtccagtgtcaccccgccatgatcttgaaaatgacagcaagcgttgatgaaaacgttcttgcctaccgtgatattcttcccaaaatccgtatagaacggggggaatacacgaaaagacggatcgaccggcttattaaacaagcgggataacagctcacggatttcctcgggatcgtgatatgagccgtttaactcgaatgtcatgcgtctggcctcatcgctcatcttgttcataaactgatggatctcgtctcctttaagaggctttcttgtctctacatacttcaagaattcgtttagtgtcataattgctattttaataagttctacttcttggtttgtttatcccttttcgattgcaacggcaaagatcgatgaaatccggagaaacttttgtagatggattacaggaattatgacctaaattacattcaccgattctccaaggtcttatatttctcgattagtttcttgaccgtgacagcgtccgagacctcttgcttataggtagtcgggttataataggcctcgaggaaactgtctgcaccggaccagactgtctcgataattccttggaaatggcgagacatttccggatttgaatgctggcgaaaatggatcatatcatctacctgttgaagcgctatctgaggtttacgccaagggcatgtagcaacgtcgaagcctttcatggcaaagtaaacagcggtttgctcggcacgctcataatgccagtcgcagataaaaacatctttcgggatcaagtcgatcgcacggtaggtattgttcatgctggcttcccaagcgccgatcccggtagttttgccatcgatcaggcggtctccccatatcatcaatcgtttgccttgtgaggctaagtggttttgtattttagtgacctcaccggcatataactcagccttgtcatgtccgccgcaacggacgcaactatcatgtccgatataaaagacctcgtccatcccggcatggaataattgagtctcgaaaacatccgtcaactcgtctactaaagcgaatacgattttatgtacttccggatggagcgggcagtaacttttacaataaagcccgtctgagttgggccaacccgtatagttcttggtatccacgtgtggcgtctcgtcgaactccggatactcacgtaataaagcgtaggtagtctcagcccatgattgatgccccaagagattgatctggggagcgatacgtattccgttatcccggcaaacctttacgatctttttcacatcctctcgtgtgagtggggtcggatccctcagttctggatgggactcataggcataattccagtctacccgtagaatcaacaagttgaaatgactgggagccagttcctcttggacgaacttcaagaatagatccaacttctgcgcggatggagcggcgatggccaagcctcgtacgggcatgatactatctaaacggtttgtctctgattgggcggaaacttgggctgaacctatagcccatataagcaagaatagtccgataatctttttcatatagcgatatgttttaatgtttaaatttttaatttgatgtacgctttcgaagatcatcacgcacatcgtgacggcccggaggatgtcgatggctatgttacgttgcgtaaaatctattggttgatcgctcataatatatttagactaaaggtgaatttaatacaagacaaatataatcaataagagacatatcattacatttgtgccttataaatatgaataataattaaaaatgatagacatgataagacgattgatttattgggttctcctacttttcgtttgtatgggcgcccatgcccaattccgggtgacagcccatcaagagggttgggaccggattcctccgcaagcgcaaaaagacggcttttggtttcaacaatccgttttagcgaatatggatgatgatgccgctatggaagaggtcatgcttttcgggcgggataatgggcattaccctactttcgacctgtttaagttttattacgtgatcgtggataattatacgaaagagatccaatatatatcggatgagatctatgtgacggataaatatgcgcttacggtggaggatcgcaataatgacgggatctccgagttatatatcgattatttcaaggatgggaagtttacggttgatgagcgaggatataatttgcgaaccacccgttgctatgaccgtatcgaatggagccccgagagtaaaaacattaaaccccaacaaccatgagaaagtatatctattttatagcgcttatctgttgcgccttatcagcctcaacctcttacgcccagaaaaaggtgataaaaacgatgatgatcgccgggcaagatggcagtcattattggcgaggtgcttgcgaggccatgaagcagattttagagaacagtggaatgtttaaggtggatttcgtctttaccccggatttcggaggagatataaatacctttaagcccgatttcgctaaatataacttggttgttgttaattacggaggtgaagtctggcccgagcctgtccaaaaagctttcgagaactatgtagcggatggtggtggggtcgtgattatccattcctccgtggtacctatggccggttggaaagcgtacaacgagataatcggcatgggagcttgggaggggcgaaacgagaaagacggtccttacctgtattggaaagagggcaaatatgtatacgattatacacccggttatgcgggttatcatggcttgcagcatgagacgatcctagagcatcgtgcgccggagcaccctattttgaaaggtctgcctataagatggaaacatttcaaggacgagatttatacccgcttgcgtggtccggtacggaatgtggagatattggctaccgcttatgagcgtggacgccatgaaccgttgatgtggacggtgaagtgggggaaggggcgtgtctttgtcgatctgttggggcattgcggcaatgacccgaatatgatttactcgatggagtgtacgggttttcaggtaaccttactaagaggggctgaatgggcagccaccggggaagtgacgcaagaggcccctcgggatttcccattggaagatacctgtacgctccgtccggaattcaaggctcctttccatgcgacgaattaaatgccttaataagatggtgtctttcgacagaataatcaaattgacaaattgtaaagttaagtcccggagaatcgatttttccgggacaaagtacggctcgctcctaaatacgcaagaaaaaatcagtaatcgtttgttaaatagatagatgtcaaaaaacagcctttcattctagcgaaattagttcatcgtaattcatatcttatgggttgtttgggctatctcatagggttacgatggggaaatgatagggttatgatgcctattcatgacagttcataaccctattcatgactgctttcgatgcccaacgtgactattggcgttgcctaacacgactagttgcgtaggctttcatgacctatcgtgtataaaaagcggcctttttgagtaaaaagcgccatatatagctatcctctttcctctacttggtaacctctctcaaaaggtagtgttacaagatacgctttatatctattaaaaagacaggattagatcgtatctttgtcattcgttcattaaagtcattggttatgtcaaatcaagaatatatcaagatcgagggagcttatgagaataacttgaaacatatctctctggatattccgaagaagcaaatcactatattcaccggggtctcgggttccgggaaatcgtcgttggtattggataccattgccgccagttcacgtcgggagttgaatgagacgttccccagtttcgtgcagcaatacctgcccaaatatggccgtccgcatgtagaccggatcgggaatctgccggtcgctatcgtgatagaccagcggaagcccgctcccaacgcccgttctacggtggggacttatacggatatctattcattgctccgtctcttgttctcacgggtgggcaaaccctttgtcggatattcggatacattctcctttaatcatccgcaaggccgttgtacccgttgtgacggattgggggagattcgtgagctggacgtgcataagctggttgattttgataaatgcctgaacgatgaggacgtgatccattacgtcaccttccagcccggccaatggcgatggatacgttatgcttgcagcggccttttcaatctggataagaagatccgggattatacgccggaggagttgcgcttattcctttattccccgcaaatccgtttgaagaatcctcctgccgactggccgaagacggcgaaatatgagggcttggtaacccgtatgtatcgcagcatcatcaattccgaggaagggaagatccatcaaaaggtcttggaaccgatggttacgatgggaatctgcccggattgcggtgggacccgcttgaacgataaggtactttcttgccggatcaacgggagaaatatagccgaagtaactcatatggcgatccccgagataatcgcttggcttcgggagattgatgacccgttggcgaaagacatgaagcaggcgatcggaggccggttatccgccttattggagatcggtttggggtatttgacgctggatcgctccatggaaaccctttccggcggggaggcgcaacgctgtaagatcgctaaatatatcaactcatctctttccgatatgctttatgtgttggatgagccgagcgtgggcttgcatagccacgatatccatttattgaaagcctcggtccgaaagttgcgggatcatgggaatacggtcttgctggtggaacatcataaggaaatgatacagatcgccgatcatatcgtggatatggggccgggttcgggtatggagggcggccgtatcttgtacgagggagattatgcgggcttactccgtagcgataccttgaccggccgtatgctaggagaaaatacccctctgaaggaaagcctccggatcccgtccggttggtttacggtaaagcatgcccgtcttcataacttgaaggacgtgacggtagatcttcctatgggagtactggcggtgatcgccggtgtagccggttcagggaaaagctcgttgatggaatgcttccgccgggatttccccgaggaggtgatttatatcagccaaaagaatatcgggatcagcttgcgttccactccggccacttatctgggagttgcggatgatattcgtaaacttttcgctaaggaaagtaaggctgggcttagtatgttcacgtttaacggaaaaggcggttgcccggtttgtgggggaaaaggcgtgatcgtgtctgatatggcttttatggattcgatcgagaccgtttgtgaggcttgtggaggattgcgttattccccggaagccttgcggtatacagtggatggtcttacgatcgccgaggtgatggacttgacagtccgcaaggcttcccttcgttttgcgggaacggtgatagcggagaaactccgtccgcttatgctggttggtctggggtatttgcatttgaaccaagccttatccacattatcgggaggtgagttgcaacgggtgaaactggcgtcttatctaggaacccaaagcaaggtctttgtcttggatgagccgacggatggcttgcacgtgaaagatatcaggcatattatctccttattcgattctatggtagatcaaggcaatagtgtcttcttgatcgaacataatctggatgtcttgaaagcggcggactatgtgatcgagataggtcctggaggcggactaatggggggtgagatcttgtttagtggtactcccaaggagttactatcctgcgagcgttccgttacgaaagactatcttgtttgatgattatgaatattatagggaaagagacgcagcacgctgcgtctctatgtgaatatacgtcaaaagtgaggtcgcttactcatcatacgagatattccctaattccttaatcttcgaatctccgacttgatgcgtgaataactcaatcaattgagcgggcgttaatgtcatctgaggcgagaactcggaggaatccatataacttaataagctacggtataattggcgggcttccgggtattcttgttgggtttccaagtctgtcatacagattaataacttgcccgggccgacattgaattcttggatcatccctaatttatgattacgctccacgttatcgatcacctgtacgattggcctgtaattatccggaagctggtccagtatcaacggatggctattctttatcatcgtgaaccattgccagtttgtatggaaatccgtcgggaaatgagcgaaaaccggatgagagggattcattaataatccgagggtacccggagagaccggtttctttacccattcgcagatggacttaaacatccggtaattccagtaatctgtctggaataatccttctaccgtcacgttcttgtaagtcttggcatccgggaaccacaatactttcgccccgttcgccaataagttctcggcctgtttatcccatttcttaataacattgatatccgtagggatttgcacgttattatgttccggataaatccataacggataatgattgtgataatccgtgccctcgatcgccagccgtaaagtataggtctcagcctcttgaatggcaggtaaagcgatatttaatgggcctacctcggccaacgtaccttgattgatttgcagcggtatgttgttttgggcgattacttgatcttgactattcgtcaaggtccaagttagatgtttcccttttaaagtggtaggtgtatagttcgctaccttgatggagcctttgagcgcctcattcccagagtaacagaatttaggtaggagagccagtaatacgacatcatcgcaagactctttccattccttggcggttatcaagcccttattatccataaaagcgtccaagataccgactaacgccgtgccctgtcccggataatcctgtaaatccaataattggaagccggccattcccggagtacggaacgccatttccatctcggcccggtaaagttgcgccatccatttaccggaagccttgaagaaatcatccgcttgtccggccataccggactcgcccagtcgtttgcggaatatctccagattccaaggttttagtgccccggtatatttcttgatttcctcataattcggataacattggaattgcccggtctcatgtccgatgataggcaatgaacattgttcgatagcggattcgaaattcatgaccgagtttggataggtatggttgatataaccgccatcctccgcatctgcgaaagagaaggaaccccgggtatggttgctgaatacgttagcgccggggactcgacaggtcgtgaagtaatcgtcacccgccgcagggccgttgaagcctagatagtcattcgatccagatgcgtataaatgccgtccgtcctcactacggaaacgggcgatcatgtctaccatcgcttcttgatccccggaaagctcgttgccgatcgccatcatgacgaaagaggcgtgattcccgtaagcctcctgtatttgtaatccttctttggtgaggaaatggatcaaagtggtatcgcccttttccatctttccccagaaaggtagttccggttggaggtaaaaaccttcgatatcggccgcctcgaaacaagctttaggaggacaccatgaatggaaacggcaatgattgataccgtattccttggcgatgcggaaatagcgtctccatgctgcggtatccatcggtacatggcctgtaagcggaaatacgcaagcatcgtgttttccacgaaggaaggtggtcaatccgttgatgttgaattgtgttccttctgctttgaaatctcttaatccgaaagtagtactttggctatcttggatattctctccttggatgttcgcggtcaagcgatacagggtaggggagaactcgctccattccaaggcgtcatcacccatcggtatttggaatatgatctcgtcttgttgaactacgatattcttattgaatttgatatggtgctctaagcctgtgttgaaagcctccatctctatttgaacggcggctacgatcatttgctcgaatggatttgaaagctttatttttacgtccaccgttttttgatccgcatgtggatatacttgtatccggcggatatggaattgtggacgggcttccaatttcaggtctccgataataccgttccagtttgtctgcgtggattccgtataagcgtgtgaattgtccaataattggggcggaacgctcaaaccgttatcgactagaatagtcaagtgatgcttcccagcccggagatatgcggacagatcgtattcttgaggggtggaaatatggtcggatgaaccgacatatatgctatctacccatatttgggtcggttttgttcgctccaagattaaccaaatgctcttgccttcccaattctctggaatcgtgatctctttctgataccaagccttaccttgatagcggaagggcctagacaaatgagttgtctcctccttatcattgttagggtatcctttttggttggtgtccgtggtacccggtaattgaacttgctcggtgacatctgttgaatccaatcgtaattcccagcaaccgacaagcgataattcctctctactctctttgggagtttggcatgcgaatagcatgagcataagtggaatactccaaaatctcttcatggtaatgtttttactctaaatatggtttacttaattaatagtgtacaaaggtagtatttttggcctttttattaaggagaagatatgaaaaaagaagaagattttgttatgggcctgtccatctacatggcttgtctgcgtgagaaaaaacggtattccacggcgaagagttatcaagatgccttgaactcgttcaagtgcttttgcggtatggaggcgattccttatgcctatattaataggaacaggcttttgtgctatcagtcatggttgttggacaagggccgttcgttgaatacggtgtctacctatatgcgtcggattcgtcacatttataacttggccgtggaggcgaacgaggctccctttgtacccaacctgttcaaagatgtcttcacgggcgttgaaagcaagcggaagaaggcgttgccgcgagagatgctggagcgtatgtttaacgccccgttggaggatccgtccttgcggcgtgtacagttgaccgttcggttgatgttcgcgttcagcgggatagcgtttgtggatctcacgcatttgaaatgggagaatatccgggatgggatattgcagtatcaccgacaaaagagcgggtctctcatacagctggagattccctccggggcgttgcggctgttggatgagttgtccgcttgtacggcaaaggaatccctttatttatttccttttttgagtggaaggagaaccggtgaggcggcctacaaagaatataacaggaccctgtcccgctttaaccgtgacttgaagttgttggcgagatcgacaggcgttacgcttccggtcacctcatatacgatccgtcattcattcgcctcgttcttgaaggaacaagatgtatcgatcgaggttatcagtgagttgttggggcataagtctattaagacaacacagatctatttgaagagcttctcgttggaacgtttgtcgacagtgaaccggaattgttttgagagcgtgtgtaaaccgatacccaaagtggggtaagaggcttgctactcgggaagtagcgtattctttcacggcgcaaaagtaataaaaaataacaaataacaagcaatcataaggcttagtttgttcattagtttgtgctccgaccttgattctccttaaatcttcgttcttattcctagtgcatagacatggcaatagagacgaaatgatctcgtatttcctacatcatcacgtccctcctaaaaatcgaacatacattcttgtagagacggggcgtgccccgtctcatcccctcaaaatggtattctaaattactgtcagacggtgggagacggagcacgctccgtctctacaactgggtaataaccattttccaaccttttaagctacttcccgagtagcttaatatttcaagcgatggtgattttcagaaaagccatttttaaagacataaagtgttgtttatcaggagtaaatatggttctcttggtagggctttgaattgtcgtgaggcttgagtggagatcctgctataatcttaggaaaagataatcataatgatgaatgttttgagagacggtcgctcggagaggggtacggcgcgggttggcaagcgtcatgacctgaagactgtacgctggtacgtgctcacgcttcctactacgggtgtggcacgacgcgacaggatcagccccgctaaaagcttggatgccgagctttcccggcgcaagcgtcgtggggagacgttgttcgagtatttcgccccctcctatgtggaggtgaggaaggtggacggaaagatggtcaacacgaaacgacccctgctgttcaactacgtgtttgtccggtcctcggttgaggagatcttccagatgaagcgcacgcttcccctatacaatttccttccccgggtctcttccggaggcatgactcatttcccttatctgtcggatgacgagatggggaatttacgttgggtggcggaatcttattccaacgagcttccggtgtacgtaccggacagcgaccgcttgctgaagggcgaccgtgtgcgtatcacgtccggttattttaccggtatggaggcggaggtggtgatccagccgggtggcggtcataaagatgtgatggctcgtatcctcgattgcatgtgggtccccttgttggaggtgaagccgggcgagtacgagctgatcgagctgaacaccaagggcaagcacgtctatacccatctggacaacgaccgcctgcgggaaggcttgcacgatgccttgggacgttaccatgcctccggcaacgtatcagaggaggatacccgcttggcccgtgaggtgttgagatcctacggttcgctccgtgcggagacggacgtgatgcgttgcaagatctactcattgcttctttctgcctacaagttgttgggcgatgaggaggagttcacacgtttgcatgacacgatgcgtggtatgctcccggtggtgaaagctccgcaatcccgtgccttgttgctggtgacgctctacggttgcacggacagcgccctttaccggcagatggcacatgaggtggtggatccgtggcggggtgagtcctcgcccaagaaaagcaagttatccttgatccgccggttggacgattacgacgggtggctcaaccatgaaataagttaacagtagacaagtgacagttgacagtttaaatcataaatcataaatcaaaaagaaatgtcttcccttccttccggcgttcgtttggtgcggttgctgaacgagcatttaaatgatatcatgaaccgcgagcgtgcgaaccaaaactcgattcacctgtattgcacgggtccttactgggtggcatttgagcgctcggcctatcagttgcgccatgtgttcccggacagcgagattacgccaatgcgtttgctcggctacccttttcctgtggtgatggtgtccgttacggatcgttcgctccgctcgtatgcccgcaagcacatcttgcgaagagacgacatagattacaaattattaacagcatcccaactctcccatgaggactaccaagcgtggcatgccggcgaggtgaaggggttgccttcattaagtgagatcgtatgagtgaggtgcaaattctattattgttattactgtccggatatctgatctccgtgtctttgggcatggtgatcatcccgaggatcttggtgatctcccacaagaaaagactgtatgatgtcccggattctcgaaaggtacacacgaccccagttccccgcttgggtggcctgtcgttttttcccgtggtcttgatgtcgtttgccttggtgataggctttcgcctttatctgtggccctcggatctgtctagcttctcgatcgagatgctccatgagtatcttttcttgttcgtgggcatgacacttctttatctggtgggtgtctgcgatgacttggtcggggtgggttaccgctacaagttcatcgtacaagtcgtgtcggccctcctgctggtgttgtccggcaattggctcgatacgctgggaggcctattcgggatctattcggtcccggccttgctgggtgtgccagtcacggttttcgccgtggtttatgtgacaaacgctatcaacctgattgacgggatcgatggtctggcctccggtttgtgctgtatcgctttatcggtcttgagcgtgttctttttcattcaagatcaatgtgtttatgccttgctcgctatctgtacgctgggaatcctcatgcctttctggtgctacaatgtctttggcaatgccaactgcgggcataagctcttcatgggcgatgctgggagtttgacgttgggctacgtgatcagtttcctgatcattcatttatgtgtatcgaatagtacctctacggagcgttcgaatccttatttggtgattgccttttccacggtcttggtaccgttgctggacgtggtacgtgtggtgctgcgccgccttcgtgagcacaagaacccgttcttgccggacaagaaccatttccatcataagttgttgcgcacgggtatgcgggtgcggatggtgatggtgacgatcatttgcgtgtccgttttctttatcgcattgaatattgtattggataatcatttgaatgtcaattgtatattatttttaaacctgtctctatggacggttcttcacttggtgatcgattggctgatcgcccggaatcggcagaagagggaatcggcattcgacaagaggttctagacaaggaaagccgggaagggcaattccgtccttcctataaatcaaaataccatgaagaaagtattgaaaggctggctcatcgataatgcggtgaccaccgacaacaagacggacaagatcttgttactggcctcggccggaagtttaactttggatgatgtgttggaggagatgtacaagcaagacaccggtctacgcccggagacgatgcgtcactctgtgaccctctaccatcggatagtaatggacttgatcttaaacggctatagcgtgaacacgggtctgttccgtgccgtcccccagttgaaaggcgtggttgagggcggcgtttggaacaaggagaataattccatctacgtctctttcacgcaagacaaggctctgcgcgaggcgatcgccaagaccgtggtggagatcctcggcgagaagtctaacatcatgtacatcctggagaccgaggatcgtaagacgggcttgaaagacggcagcgccactgcgggtcacaacttcttcgtccgaggggcgatgttgaaagtggttggcgaccacgagtcggtaggtgttacgctgaccgactccaaaggtgccaccacgaaactgacggacgaccagatcaccatcaacaacctttcttcgctcacgttgctcctgccggctgatttggcggaaggtgagtacacgctgactgtgacgacgcagtatggtagtgcgggtcacatactgaaaacgcctcgtagcgtaagtacgcaaatttgggtgggcggaaagcctgctgatggcggtggcgatagcgagagcccggatgagatctgacatatttggtaaatcgctattaccagtacagataaatcactattacctgtactggtaaaccacctttacatgataaggtaacagggatttctcggttgagtatgctttggaaatagcttgtacattggtgagaccacggtgtgatctgataatgggtgtaggaattatgtgaataaagttcctaataacattacattggacacagataatgttaaaatcaaaattgattgttaatatgactaggtttagggtactgcaaagagcctcccctagagtgtacgccttgtattgagtttgcataatatttaaatgatttattaatagagagatgagagaacgtattgttgccttcgactatttaagggctcttgctattaccggtatattgctatgccatttttgtcataattataattcaatttcatttttaggacattatttcggaggtgtctttgtaacattgtttatcgcaatgtctggtatgctatttggtattgtatggaataataatagccggatggaatatgatatgtcttttctgaaacaaagattttttaaactttcagttacatattatccatttctgattttaatgtttgcattcctttattttgtggatgattatcatttcaatgtaaaaaatctgttcctaataaatatgtttcatttttgtttttttattagttttgagatatatttgatgtttgaggttgttagtgaaggacgttattccttaatgcgtattatagataatcctttttttgcttttgtagtgtatgtgatttctagtgtattattgggttgtatattgcattttgttgtaaaatacataaaaaaatatgtgctttaattgctcttaagtcatgaaatattattctctgcattgtctggtgtgtcttaataaagtgtgtgctttggattgttcgattacgattttatgtctgcaaattccgaaaacaataagcgaatagctaagaacacgttgttcctctacatgcgcatgcttctgattatgggggtgacgctgtacaccagtcgggtcgtgttgagggttttgggtgtagaggatttcggcatttataatgtggtgggaggggtagtttccatcatgagcttttttatttctagtttatctaatgttacccaacgatatatgaatataggtttgggaaaacaagacttaatggagacaggatgtgcttttagacagagcctaaccctcatgtggctgttatccgtattattattgctgtttggtgaaacattgggactttggtttgtatacaataagttagtgatacctccagagaggttaggtgctgccgtttgggtatatcatttttcattgatctccatactttccgctattaatcaagtcccattaatgggggctatagttgcgcatgagcgaatgaatatatatgcctatcttggtctttttgaggcttgtgctcgattattcatagtctatttgcttgaagcttttggaacaatcgattcgttgatattgtatggtttgcttatggctatagtttctgtcttcgtctggctaatttatgcgatatatagtgtaaggtcatttaccgaatgtaaatttaggttttattggaattatagtttggtcgcagagatgtcaaagtttataggtcaaaatttatttggctgtttcgcttggtctgcaggtgtacaaggaacaaatatccttttaaatatattctttggtcccgctgtaaatgcggcacgagcggtttctgtgcaagtaagcgcagttgttacacgttttactgagaatatgatgacagcggttaaacctcaaataattaaatcatatgcttccggtgattgtgaatacatggtgacactaattgagaaaagctctaaatatgcttatttcttagcggccttgatagctatacctgtaatggttgagatagagtttatactggaggtttggttaggtgaggttccaagccatactatatcattcactcgtcttgttctgtgtgaatccttgataggagtatttataccacctctatggatggcggcaaatgcaactggacatataaaaaacagtcaagtatatggtagaatgttcacgttggcgatattacctataagctatcttttgttaagattgaatgctaatccgcttgtcccatttattgttgcggttttagcaaatgtaggatattggttttatagtttgtgtgatattcataggcaaatacagttgaatatgagaaaatactttcgagatgttgttaggcctatattaatttttacattctcattggtgttagtcggttctatattgatgttaatcgaacctaatgattcagtttttcgtttcttgatagttttttcgctttccgtatttattggctttagtgttatttatagtttgttgcaatcaagtgagcgtatgatattgcatgcggctctaaaacgatttgttgttaaatagttgtttttgttattaatagagtaaaaatagtatataagcaatgtagggttattgaatcatgttaagtaactagaatatatttgatgtaatttgaatttaaattatttatatatgacttgtggcaataaaaaaagaattctgttcgtgatgcaaagcctttatgatggtggagcggaaaaattattggtggatatgcttaataattttgattatagtaaatatgatatagatcttttgttagaacatgattttggaaattatgcaaatctagtgcctttagaagtgagaaaaataatattattctataatattaatagacccttattagaaagaatgataggaaaaataatgtcctattttggtttatattatttttatatattattttttagaagacagataataattgataagatgaaaggtgaaaagtatgatacgataatatcttttttagaaggacggagtttggtgtatcatagctttatattgaagcaaggaattaggcatttatcttgggtgcacgtagatctgtttaatttccattggacaaaaaggtatttcaaaagtaataagcatgagaagaaatgttatgaattaatggatgatgtgatctttgtgtctaatgatgcgaaaaataaatttcaacaactttttaatgtgactacatccacaaaagtaatatataatttgatagattgtaagacaattgtcttgcgggcaaatgagtttaaagttgagaaaaggaaatttacggtttgtctagtaggaagattggttagacaaaaacaatttgatagtattataagagttgctagaatttttgtagataatggatatgatatagatttttggattgttggtgcaggttgtttggagtcagatcttagtaaaatgatccatgatttacatttggatgataatgtacaccttttaggttataagcctaatccttatgtctatataaagtgtgcggatttatttgtgagttgttctttggcagagggattttctttagttgtggcggaagcattatgtctgggaaaagcaattgtgtctacaaaaacagttggtccagtagagcttttagggtcaaattccgagtatggggttttggcagacaatgatgatgaatctctgtataatgcaattaaattatttgtcaatgattataataaggtctttgtctatcaagataaagcagcaaaacgttctttgatgtttgatgttgaaaaaacaatgaatgaaatatatagtattttatgactggctcatttgttattaagaagaatagaattttagagatattgttctttattataatatttcttgttaatcttaaaatgacactaaatatatcagactttgctacagctaatttatctatacttattattggtatttcttttatttcgttgctttttacaaagatagatgataatatttattggatagttctattttttatactttcattgtttcgtgtggaagcatctaaaatgttgtttgtgtcattgctggtatcaatatctaggaatctttatattgataaaatgactaaatattctttttgtctaactgtattattcttaattataaattacggtttattgattttaggagtgttgcatgaagaatattctgattttttctataagtctggaggcgttgttagtgatatgggatatggaaatcctaacctgttttcattgtatttgtttttcttggttatttttcttgtggttttaaagaaagaaattaatacatttcttgtcgcttttatagtctttgttatatatgaatcattttattctcgtacggttctgttctctggctgtattctgcttgttttatcttttgttcaaaaaacaaatttaaaaaaatgtttctttaataaatatatattgttgtcttatccatttgtgatactattcttttttattgttgttttgtttaatgaatcagagtattcttttattcatgaaattagttctggtagattaaggtattctttgctcgtatttggcgaattaactccgagtaatttgttgattggtgcaactaatattgatgagtctattataatagatgttgcgtatatatcattgctgctgtcttctggaattttttctttagcatatttgtataatctatattgtaaggctgtttctaagtttgattataatttgattctcattcctgtaatgcttcaatatttatttttgagtttgtccgaaagtgctattattaatacatatctttggggaggtctgtttttttggatagtaatgtcgggtaagtattcttgtggtaaaaccaattaattatttatatgttttttgatttaaagaaaaaaatatcttataaagaatggaatgtgggattttttaatgctattccagaagatttagtcagtgataatattgatttgtctaatatcacttggttaaggagagactctaaatttcattgttatgcagatccattcattttaaatgtatctgactgcactattgatttgcttgtagaagatatcttgttaggtagtaaaaatgtagcaacaatatgtcatttgtctgtcgataaatgtacaggtgaaataattgaaaaatatacgttgatagatgataatatacataacttttatcccttgattattagaggtgatactcttgatgaggtttatattgttcctgaaaattcgtattctacagaacttaatgtttataagtataatactttgttacattcttgtgaacatttcagtactatgcttcctgttgcagttgcggatgctacaatcttgccttataatggagccttttatctttttgcaacttcaagaaatgcatataataaggatttgtatatgtggacttcaaataatagattatatggatacgatttgtctccaatattaataaaatctaatttgtttgggagcagaatggctggtgatttcatgtacgtaaataatactgtatacagaccagctcaggattgtttacaagggtatggtaaaggtattattctgtataaagttgaggatatttcagataagtcctataatgaaacaaaagtaatatccctttatcctgattcctcgtcatattactcggatggtttgcacacgataaatttttataaaagcatatgtgttatagatggttataagaatcactatattccttttcagaaaatatatcgtaaattatttgataagtatagatcatgaatatcttgtttattagtttattagatccttctgaatcaggtagtggcaatcaaaaagtcactttgttgtctgccaaatatttgtctagtgttggaattcattgttttatagcttattttaaagattctgaatatagttcctctcaattagtctttgatgcgaaatttaaaattgattataatgatttagatggtttccgttcttttcttattgataatgagatttctattattcataatcaggcatcaagagctgttaatatgaaattccttggtcaagctgttgcgggattaaaagtgaaaattatatcagttttgcataatcttccaggaacagagaatattagatataataagcaatctcttttgtttcaagttcttaataggcggatttcttttaagtggcttatttatcttttattgttattcttctaccctattactcgttttctagttaaatatactaccaaaaggaagtataaatctatctataaatactcagatgctttagttctcctatctgatgcttatatacccatttatagatctattgctaatttgaaggattcttctaagatggtctcaattcccaattttctctcatttgattatgttgagcgtaactattctaaaacaaatgaattgctaattgtggctcgatttgatgaaatatctaagcgtatattactagcattaaaaatttggaaacattttttatctacttatgacgtgagagattggtgtttaactatagttggttatggagagtgggaatctgtttataaagactttataaataaaaatgatattgtaaatgtgaaattggttgggcgtgatgattcaaagaaatattttgaacgttcgtcaatactaatgtttacctctttattagaaggtgctccactaagtctgcttgaagctatgcagatgaaagtagtccctattgcttttgatgattgtatggctattcgaggtttcttaattaatgatgttaattcaaaagttattaagtctttggacatatctgaatattctcgctcgatttatgacttaattactaatgaaaaattgcgttgtaaactttcagagaatgcttttaattgtctccattattttactgtaaaaaatgttatgctaaggtgggtggatttgtataatagtttgttgaaataatatataattatgtgtcacgaaaattttattattggatacacttctggagtgtttgatatgtttcatattggtcatttaaacatactaaaacgagctaaggaattgtgtgattttttaattgttggtgttagtaccgatgaattggtaagagagtataagcataaaagtcctataatctcttatgataatcgtaaggcaattgttgaggcttgcaaatatgtagataaagtagttcctcaagttaatcgagataaaatgtctgcttatcatcgtttgcatttcgatgtgatgtttgttggtgatgactggaaaggtaattctttgtttcaggaagtagaagctgagttgaataagaatggaactaaagttgtttattttccttatactaaaggtatttcttctactatattgcgtgataaactagtttaaattactactatgaatgttgatattaaagattttcaatataaaatattagaaatagcgttttattttgatgagttttgtaagaaatatgatatagaatattatttaatgggtggaagtgctttaggtgctgttaggcatcatggctttattccatgggatgatgattttgacgtttttatgacttttaataattatcataagttccttcattatgcttctatacatcttgatacagaaaaatttcatcttcaaagagaaaattctactgagtggcctttgtttttttctaagttaagaatgaatggaacaacttgtattgaaaaaggatataataaaatgcatcaaggtatttatattgatataatgtgtttgtataatgtatcacctaataagtttgttcgttatattcaatatttatccgctcaaattttaaaagctacatctctttatttggtagattacgattctgatagctttttcaagaaagtatttattaattcttgtcattttgttgtaggtactacagcaaaaaactttttattcaaaatattgaatcacttttcaactaaaaatacgttacttgttggccatttttttggaaaggctccgtttcccaaaacgagttttcctcgtaaatggttaggaattcagcgctatgtgaattttgagaatctccttttacctattccttttgaagcagaaaaatatctttctcttaggtatggtagcgattttatgaaaatccctaattctgatatttttacagaatatcctattcatgcagtttttgttgatatacataatgattatacaatttataaagacaagtttaattcttaattatcttagctttagctgattacttaactgaaaaatcttttctttatcatgaaagtagtacttcttgcaggaggtttcggttctcgtatatctgaggaatctcagttcaagccgaagccaatgattgagattggtggtatgccaatcttgtggcacattatgaaagagtatgcctattatggttataccgagtttatcatttgcgccggttataaacaggaatatattaaggagtggttcgccaactatttccttcataactctgatgtgactttcgactatcgtggtggcaacaacgaaatgaccgttcatcaaactaatatggagccttggaaagtcacagtcgttgatacgggctacaacactatgactggaggtcgtattaagcgtatccagagatatatagagaatgagactttcttgatgacatacggcgatggtgtttgtgatgtagaaattgataaattggtggagtttcataagagccatggcaagcttgcgacccttacggccgtcaagatagcacaagataaaggagtcttagatattactaaagatcaagccgtaagggcttttcgggaaaagaacgcctctgatggcgctcctattaatgccggctacatggtgttggaacccgaggtttttgatatgctggaagggggtgactcttgtgtcttcgaaaagaccgcactagtcaagttggcgcaagagggtcagttgatgtcttacatccatactggtttttggcagtgcatggataatatacgtgagaaatctatgcttgaaaaactgcttgccgaggataaagctccttggaagcgttgggagcgctctgttccggaaataccagattacgcaaaataataagttatcatacgaatgggaaatatattggatttttataaaggcaagaggattttccttacaggccataccggctttaagggctcttggatgtgtaggatgctcgctaatgccggagcgatcgttacaggatattcactgaaagccccaacagaaccatcgctatttcgaattgccaatattgaagatgacatacattccgtgattggcgatatacgagattatacctctctaaagaaggcttttgatgagtctcaaccagaaattgtactgcatcttgccgctcagcccattgttagagattcttataaagatcctgcctatacctacgagacaaacgtgatgggtaccgtgaatattcttgagtgtgttcgcaataattgttgtgtgaagtctttcttgaatgtcactacggataaagtgtatttgaatagggagtggagttggggctatagggagaatgaggaattggatgggtatgatccttattcaaattccaaatcctgttcggagctggtgactcatagctacaagcgttctttcttcacaaatattgatggtctgcctattattcctatttctactgctagagcgggtaatgtgataggtggtggagatttcgccaatgatagaatagtacctgattgtatccgtgcggctgtaaaacatgaggatattgttgtgcgtaatccatactctacccgtccttatcaacatgttctagaacctttgtatgcttacctgctgatagcgatgaagcaatatgaggatatcggttttgcggattattataatgtaggtcccgatgatgtggattgttttcaaacaggcgctcttgttgagctatttgtgaacaagtggggcgaaggtatgaggtgggtgaacaagtatgacggtggtcctcacgaggctaatttcttgaagcttgattgctctaaattgaaaaagacttttggatggagccctcgatggaatctggatgaggcaatggaaaagattgttgaatggagtaaggtttggctagcaggtggggatgttcgtgtttgtatggataaacagataaatgaatttttaaacgtataacgataatatgaagaacgtaatcgtcacagggggcaatggttttataggtagttcacttataaagaaattgatagaaaaaggtactagggttgttgctgttgatattacctttcatggcaatcgtttgcctgattcaaatcttattacgaggatagaatcaggggtgaatacatctctagtcgaaagactgccagtaattgaatatgactctttctatcattttgcgtggaaaggtgtaaatggggctgataaagcagatcctacggttcaattatcaaatattcagatggcagtagattgcgctaatatttgcaagaggctaaatgtgaaaaaatttctttgtgcgggtactgtagcggagaatgtagcatttagtttgtcgcatctgaaaaaaacgactggtggaatgatgtatggtgtggctaagcatgcttgcagaataattttggaagattattgcaagaatatcgctcaacagtttgtgtggatgcagttctcaaatatatacggtgtaggtaataaaacgggcaatttggttagttatacgttaggtgagttgatggctggtaaagaagcagcatttggtcctgctttacaaccatatgattttatttatgtggatgatcttatagaagctgtatatcgtctaggctttaaggaaactaataagccattctattatataggctctggcaatcctaaagtcttgaaagattatcttattcgtataggagaactagttggttgcgcagataaggtagggataggagtccgtgaagatgatggtgtaaagtatacaatggatatgtttgacaatagtaacttggttagtactattggagaatatgcgtctatagactttgataaaggcattaataaaactattaattggcttaaaaactctttgatgttatagcggaattagtcatgatacagaaatttgaattcaagggacttgatatgaagggggcatatgagataactcccttctatgccacagacgaacgtggtggctttataaaggattacaatattgatgcatttaagcaaaatggtatagatcatgaacttaaagaggtgttctataccattagtaaaaagggtgtaattcgtgcgatgcacttccagcttgttaaacagcaagccaagcttgttcgttgtataagtggccatgtgtatgacgtaatcatagatcttcgccctgattcgccaacatttggtaaatggcaaggttttgatctgaccggagagaatcagaaggctctatacatacctcagtattttggccacggctatttggtgctggaggattctgtcgttagctataaatgtggtgaggtgttttatggtgaaggtgatgccggcataatgtataatgatccggatatggctatagagtggcctttcgataagattggcggtattgagaaattgatcatttctgacaaggataaaaacttgatgagtttgaaggaatatatagaaaaagtacaatagctgatggataagcgactttctatttatgttagttctcctgattcgtattctgatgtgcttgccgtatttttaaaagggtatcggagatattggagtgattgttcctatgagtttattctaaccaccaataccaaatcgtatgaaggtattacttgtatatgcaataataagcaaaatgatacttgggttgagcgtactatagcggctttgccagttataaaatcgaagtatgtaatgttgatgtgtgatgacattatcttgagtgacaatgttgacaattcattaatagagcggttacttgactatatggatagccacgagataaggtattgtaatttaggccctactcctaaaggatctaaaattaaatcttttcctttattgcgtagtgtcaataagcaaatcccctatgctatcaatcttcaatttggaatatttcgaaaggatctttttgttgagctgttaggcgatggctctcttagtgcatgggatattgaaaactcaataaatgaacaagccgctgttgctccatcagaggattataaagatgtggtggcagtttcagaatatatcttgccatatatacatggagtatataaaggtaaatggattaggcatgctgttgaaaatttgagtagattgagcttgtatatagattctggtagaggcattgttcctctctctcaacagataaagattgatatgactaattggcttcagtggaaaatatcacctaagcaacggagagcgctaaaaaatgtcttaagtagagtgggtatgaaatttgcaacgaagagatgagctggtgtaatgtggttatgaagaatgtttatgttttttaattctgtaaatcagagagttgttttttttatgaggcagattaggatcatgagaatgagaaagatagatttgagacggttctttacgtacagactctgtaaagagtcaatcttcaagtgttccggatacatcttatatgtacatatagaaatttttcttatataatacttttcctgaaagtctatgttattttccgtattactttctttatatcataaagagagcccactatttttacgtcaaagtctgaccagtatcttcacgcaaacgctattgcctatagaagttgtcttggtggaagatggtcctttgacggatgagctgtatgcggtcataaaagaattcacaagccagcatcctgagttaaaagtgatttctttgcccaccaaccgaggtctcggcaaggctcttaacgaggggctgaagcattgttcgtatgaccttgtggctcgtatggacacggatgatatcgctaagccggatcgttttgagaagcaattggcgatatttttggaacatccggaaattgatgtagtgggggcttggatcgatgagtttgaaggggaggtatcaaatgtactttccatgcggaaagtgccggagcagcatgaaaatatcttgaggtttgccaagggaaggtgtccggtgaaccatccggtggtgatgtttcggaagtcggccgtgctaaaggctggaggatataagcattttcctttgttcgaggattattatctgtgggtacggatgctgatgaatggtgcccggttctataatatacaagagagcctgctctttttccgcttctcgccggatatgtttcggcggcggggaggatggcggtatgccgtaacggaagtgaggttgcagacgctgttttacaagatgggttttatcggctttttctccttgctaaagaatgtctgtattcgcttagtgacccgtcttctccctaatggcttgcgttcgttgctctataagaggctcatccgggggtaaatagctttttgtcctcatccacagtatcgctcacggaaggtgtctcaaatatcaaataacattttatcaatagtcatttttatggctggcagattatttttcatcacatcaaacactataacagcgtctatatcgaaataatgatgtgctataatgtctcgcattcccataactccttccatgttcacggacaatgtcgctatcgctataaaccattggcagtacttgcttgtttaatagccattattacgttaataaaatagagaatatgagaacaaatgattcaaaaacatccgtagactctaaattggaggagatggaggaaaagtatcctgtagagcaaatcgctgttaaaaatgagaagaaaataacggccaaggatgtaaaggaggctgtgaaagagattaatcccgatacggacagcttgggtagcagagggtaaaacgtattttaatttgcttaaaagaataattattaagatttatagtattatctttgtggttgcggtttgtaataaaccgaggtataaagattggtaaatctagcaaattaaataataaagatgtatagaacaagaacttgtggcgacttgcgccttgcggatgaaggtctggtggttacactggccggttgggtgcagaaaacccgcaaaatgggaggaatgacatttgtcgatatccgcgaccgttatggtattactcagttggtatttaatcaggaggttgatgcagctctttgcgaaaaggcgaataaactgggccgtgaattcgtgattcaggttacgggtacggttcgtgagcgttccagcaagaatgcgcatatcccgacaggtgatattgagttgatcgtttctgaattaaatgtcctgaacactgcgcttacccctccgttcacgatcgaggaggagacagatggcggtgatgacttgcgtatgaaatatcgttatctggacttgcgtcgtgcttgcgttcgtaagaatctggaacttcgtcatagaatggcgttcgaggttcgccgctatttggatgagcaaggtttcttggaggtagagactccggttcttgtaaattctaccccggagggtgcccgtgacttcgtggttccttcccgtatgaacccgggacagttctacgctttgcctcagtctccacagaccttgaagcaattgttgatggtttccggtttcgaccgttatttccagatcgtaaaatgtttccgtgacgaggatttgcgtgcggatcgccagccggagttcacgcagatcgactgtgagatgagcttcgtggagcaagaggatgtcttgaatatgttcgagggcatggcgaaacatttgtttaaggtaatccgtggtgtcgagttcaaggagtcgtttatgcgtatgacttggcaagatgctatgaaacaatatggtagcgataaaccggatttgcgtttcggcatgaagttcgtcgagttgatggacatcatgaaaggccatggtttctccgtattcgataacgctgcttacatagggggtatctgtgcggaaggtgctgcaagctatacccgtaaacaactggatgcgctgactgaattcgtgaaacgtccgcaggtaggtgctaaaggtttggtttacgcccgtgtggaagcggatggtaacgtgaaatcaagcgtagataaattctatagccaagaggttcttcaagaaatgaagaatgcgttcggcgctaagccgggtgatttgattttgatcctttccggcgacgatgcgatgaagactcgtaagcaactttgcgagttgcgtttagagatgggtaatcaattaggccttcgtgacaaggataagttcgtttgcttgtgggtaatcgacttcccgctgttcgaatggaacgaggacgatcaacgtttctacgctatgcaccatccgtttacctctccgaatccggatgatataccgttgttggacacggatccgggcgctgttcgtgcgaatgcgtatgatatggttatcaatggcgttgaagtgggtggtggttctatccgtatccacgacagccaattacaggataagatgttcaagctgttaggattcaccgaagaaagagcgcaagagcaattcggtttcttgatgaatgcgttcaagtacggagcgcctcctcatggaggtttggcttatggcttggatcgtttcgtgtctttgttcgccggtttggattctatccgcgactgtatcgctttcccgaagaacaattctggacgagatgttatgctcgatgctccgggtgtcttggatccggcccagttggacgaactgaatttgatcgttgatatcaagaaataatccaatctgaaattccattcgaatgggaatcttattccatctgaatggaattttcttttcttccgaaaggaattactttttctcccgaacataaatcaaaagatatttagcatggtaaaggttaaagatatattgagagaaatcgagcattacgccccgctgccgcttcaagaaggttttgacaatgcgggtgtgcaagttggcgacgtgaaccagcatgcgacgggtgtgttgctatgcctagatgttaccgaggaggtgcttgatgaagcgatcgagatgggatacaacctgatcatctctcatcatcctttggcctttaagtcgtttaagtcgttgactggctccaattatatcgagcgttgcatgatgaaggcgtgtaagtatgatttggtggtttatgccgcccataccaatcttgataatgccgtaggaggcgtgaattaccgtttggcagagttgatcggcttgcaaaatgtacggatcttgagcccccaaaaaggcgctttgctgaagttggtgacgtttgtccccgaggcttatgccgagatcatgcggaataccttgttcaatgccggtgcgggaagtatcgggaactatgatgcttgcagttataatttacatggcgagggaacattccgtgccaatgcgggatgtaatccgttttgtggtgagatcggcgagttgcatgtagagaaagaggtgcgtatcgagatgatctttccggcattcaagaagacggcggtgacccgtgccctgttatccgttcatccgtatgaggagccggcttttgatttttattcgttatcaaacacatgggaacaggcaggttccggtgtagtgggagagttgcctgccgaggaagatgagttgagtttcttgttgcggatcaaggccctgtttaacgtcggttgcgtgaagcattccccatttactggtaagcctatccgagaggtcgctatctgcggaggcagcggcgctttcttgatcaaggacgctatcgcgtatggtgccgatgtctttataacgggggaggcaaagtacaacgatttttacgatgtggaggaccggattctactggcggttatcggtcattatgaatcggaaatctgtacaaaagacatattttataacataatatcgaaaaaattccctacctttgcggtacatttttcgaatgttaattcaaacccagtaaaatatttatagaatggctacagataaacaatcagctgaaaaggaatatacggttgaagaaaagctttctacgctgtatcaacttcagacgatgatgactgaaattgataagatcaagacccttcgtggtgagcttcctctggaggttcaagacttggaggacgagatcgcaggactggaaacacgtctccagaactatcaggcggagatcaaggagtttgaggcttctgttgttgagcaaaagcataagatcacggaatctaccacattgatagatcgctataaggcacaattagataatgtgcgtaataaccgggagtttgataacctgtccaaggagatcgagttccaaggtttggaaattgagttctcagagaagaaaatccgtgagttcggagaggcggtagacgctaagaaaaaagatatcgctgaactgactgagaagctggaaggccgtaaggctgacttggttcagaaaaagagcgagttggagcagatcatttccgagacaaagcaggatgaggagaaacttcgtgagaaagcgaagaagctggaagccactatcgaacctcgtttgttgaccgctttcaagcgtatccgtaaaggtgctcgtaacggtttggctgttgtttatgtgcaacgtggcgcttgcggtggttgctttaacaagatcccgcctcagaagcaattggatatcaagttgcgtaagaaaattattgtttgcgaatactgtggtcgtattatgatcgacccggaattagcaggtgtagaagattaattcaaaagatctataagtaatggctctagctaaaaccggctagggccattattgtttttaatacaaagatgttatgatacatacgatacgtttatatatagagaagtaccggctgttatccgaggatcgtccggttttggtcggattgagcggtggtgccgattctgtggctttgttgggcgtattggtgcgtttgggatatccgtgtatagcgcttcattgtaactttcatttgcgtggggaggagtcggatcgggatgaggcatttgcctgtgagttcgcggaatctttggaagtaccctttcataagatagatttcgatacgatctcttatgccggagagaggcatctctcgatagagatggctgcccgtgaattgcgctatgcttggtttgaggagatgcgggagcggctgggagggcaggcgaccgccgtcgcccatcaccgggacgataatgtggagacggtcttgatgaatttgatacggggcacgggaatccgggggatgagcgggatccgtccgaggaatggtttcatcgtccgtcctttgctgtgcgtaagccgtgaggatatcttggcttggctggcggatcaaggctacgcctatatggtggatagcacgaatttatcggatgcttatacccgtaatttcatccgtttgaatgtgttgccgcttttggaggagataaatccatcggcccggaataccatcgcacgttccgccgagcatctttctgccgcagagactatatatatatatgtattggaacaagcccggaaagaggttgtcgtatcggatgatcgtctttctatcggggcgttgatgcggtttccggctccggagacgattttgtatgagttattaaaagaatatggttttacccgtctggtctcggacgatattttcgctgccttgaccaaggagcctggtaagctgttttactcttccacccatcgtttgctgaaggatcgggattatttatggatcacttctttagagaagaaggaaaagcgaaccttcgttttagatccagaaaagggcattaatcatgaacctattgaactatctttccaaaaacttgttataactatagatttccctatcgagaagaataagcggatcgcttatttggattatgataaactcgatttccctttaacattgcggacttggaaagaaggcgattggtttattcccttcggaatgaaaggacgtaagaagttgagtgactatttctccgatcataaatttagccggattgagaaggagcgcacatggcttctttgtagtggcgacgctatcgtttgggtggtaggagaaaggactgataatcgttttcgtatagacgaatcaacaaagcgtgtgctaattgtgaattttttgggctaaatcctcgtttattgtaaaaatattcttacatttgcgaagatttactccgcagatatgttactaatggttcaaattagctgaacaatccggttattacatgaaaattataatttaataaagatacaatgataccattgggcgtacgtcgtgtttgcatatgtgatccgtgtgtatgtgccatttatattattacttcgcaatatgcagaaatataacattctagaactaaatgaaaaacttcttcccgaacttcaaagtatcgcggaagagttgggaataaaaaaagttagcagcttaaagaaagaagagttggtttatcggattcttgatgagcaagcgatctcctatgccggcattcaggctgaaaagatgaaagagaaagaggctaagaagcctgtagagggccgtaagagaggccgtccggctaaagccgcttctcctaaagtggcgaaggctgagactgccgaagctgcagagagtgcccaacaggcttcggaaaagccagtggctgctccggctgacaagaaagagcaaaaagagcagcctgaacgtaagaaaagagtccgtatcgagaaaaaggaaaaggtagcgggcgctatcgctccttccgaggataacaaggaagtggtggtttcgaaagagccgcaaacgatctctatggtaacggaaatctcggccgtggaaactccggcggtagtagagagcccggtggagaaaccgttgttgcctcctgttgtggcggaacttgaaacggaagaagaagccgctttgccggaaaatacgactccggtagaggtagcggaagaaaccacttcaccacaagcgacggaagaagagcctaagcgcatcgtatttcgccatccggacgctaaatccgtattggatcagattttcccgttctccgctccgaaacccgaggctaacaaacctcaacccgaggccgctccccagcagaataatcctcgacagaacaatcgacagaataatcataataacaaccgtaataacaataacgctaataacaaccagcaggctcaagagaaaatgtatgagtttgacggcatccttacaggaaccggcgtgttggagatgatgcaagatggttacggtttccttcgttcttcagattataactatttgacttcaccggacgatatttatgtctctcaatcccagatcaagttatttggcttgaaaacgggtgacgtggtagaaggctcgattcgtccgccgaaggaaggtgagaagtatttcccgttggtgaaagtggacaagatcaatggccgtacgccggaagaggttcgcgaccgggttcctttcgatcatttgaccccgttattcccggatgagaaattcatgcttacggcacgtaaatcaccgaaagtatacgataatatcgccgtacgtgtggttgatttattctccccgatcggaaaagggcaacgtggtttgatcgtcgctcaaccgaaaaccggtaagacgatgttgctgaaagatatcgcgaacgctatcgcttacaaccatcccgaggtttatatgattatattattgatcgacgaacgtccagaggaggttacggatatggctcgtagcgtggatgcggaagtaatcgcttctacattcgacgaaccagctgaacgtcacgtgaaaatcgctgagatcgtattgaacaaggcgaaacgaatggtagaatgtggtcatgatgtcgtgattcttcttgactcgatcactcgtttggctcgtgcttataatacggtacaaccggcttccggtaaggtgctttccggtggtgtggacgcaaatgcgttgcagaagccgaagcgtttcttcggtgccgcccgtaatattgagaatggcggtagccttacgattctagccaccgcccttacggagactggctctaagatggacgacgtgatcttcgaggaattcaagggtacgggtaatatggagttacaattggatcgtaaattagccaataaacgtatctatccggctgtggatatcacggcttccagcactcgccgtgatgatttattgcaggatgagagcacgttgaaccgtatgtgggtcttacgcaaatatctatcagacatgaactctatggaggctatggaatttgttaagcaacggatggaacaaaccgttgataatatggaattcttggcatccatgaacggttgataatatcccataaaaaacactatacttttgagttcgaaacatattgttttagctccaaaagtatagtgtttttgatttaaaagaataatgcttttattgcgcctttttaggccttccacggtgtcccgtattccgtttttgtgggctcgaggatgatcctttatcctcacttttacgaggccgtcctctgcctcttttattcataccgtatttttccggctcatacaagggcacttcaccgaattccgggctgaccggtatcttataaacctctttttccaagaaatcctctatgcgcttgaattgtgcttgttcatcgatcgatacgaaagtaatcgccaatccttcgccgttcgtaccccgtgccgtacgtccgattcggtgtacgtaatcctccggatcatgtgggatatcgaagttcacgaccaacttgatgtcattgatatcaattccacgtgccacgacatccgtagccacaaggatatcgatatgtccgctcttgaattctttcatgacctcctccctttgggattgctccagatccgagtgcatggcggctacattgaactttaatctttttagggtagacgctaattctttcaccttcattttagaagaggagaagataattacccgttgagggcggctttgagtgaagagatcttgtagaatcttgagcttttgtggatcgtagcagatatatgcggtttgcatgatagattcgggcgggcgtgagatagcgatcttgacttcttccggatcttttaggatggttttagccaacgttcgtatcttaggcggcatggtagccgagaacatgatcgtctggcagtaggggggcagctgtttatgaacctgcatgatgtcgtcataaaaacccatatccagcatgcgatccgcctcgtctaagacgaagaacgacactttagacaaatcgacagtacctaacttaatatgggacaataaacgtcccggggtagcgatcacgatatccgcacccatctctaaacctcttttttgttgttcccaagcgattccgtcggtacctccatacacggctactgcagatacggaaggtataaaataagtgaatccttgaatttgttggtctatttgttgagccaattcccgggtcggtgccataatgaccgcattcaccgcatctgtcggatgacaacctttgcttagttcattaataactggcaaaacatacgccgccgttttaccggttccggtctgtgcgcaagcgatgatgtctttaccttctaaaatgacaggaatcgttaactcttggactggagtcgtttcgtcaaaattcatgtcataaagcccgtctaatacggcatcttccaaatctaattcatcaaatctcatctttttacattcaaattcccggtaaagataaagattatttagaaatattatgcaataggtaggtttctctttggtgataaatagaaaaataaatacctttatccccgagttataccccaaaaacgaaagaattaatatgaatagtctagaaagcggaagtaacgttcagtctggattagagatgatcatggagaagagtcccgatacgatcgtattagtagatcgaaatcttactcttgtcaaggttatttctgcaaaagacgattattatcattatttagcgaataactgtatcggaaagcaacctcaagcgttgttcccggacgggaagaactacgatcaatatgagatctatagagctgcggttaaacgtgttttcgaggagcaagtgaaagtggatttctcttttgaggtctcttttgagggaaagaactattattatctatcgcaagcaagcctttttaatgaggagcttgtgatcgtttatacacgcaatgtatcttctctgaaaacagaaaaaaatctacaagaactgatcaatacgatattagatcggttaccgttgggtgttttcgtgaaagatggggataaccattttaattacctgtattggaatcattttatggaggaaataacgggtattgaaacccgggagatcgagggacatgatgatttcgaggtgaattataatgccttgatgaccgccgaggagcgtctggaaaccgatatgaatgtgatcaagacaggactgaccgctagatttaagggcaaggtaaaatcggcctccggcgattaccgggatatagaggtcgctaaatatcctatttccctaaataatggcaagccgcttgtcttggctttatggagagatataacttccgagttggctacggagaatactttgagaagaacccggatcttgacgaaaatggcattgcggataagtgatatacgtacatgctcgatcttcatcgatccggacagtacccataatttcaaggattccgttgtgaccttgaacgattggaataccatgtcggaagatatgatagaggtgtcatgggggcagtttatcagccgggcgcatccggatgatcaagaacattatcataatatgtttacccgtctttgccgaggggaaatctctgaggcaaggatcgaggcacgtatgctatttcccggcaagaaggaatatgtttggagagaggtattcgctaccgtgtatgaacgggacgataaaggaagaccttcggttatccttggatgttcaacgaatattcaggaacggaagaatcaagaattaagccttgaggaggcgaaggtgaaggctgaggccgctgataagatgaaatcgaaatatctggcggatatgagccatgagatccgcactcctttgaatgcgattaccggtttctctgaattgatggcttttgctgatacggatgaggaacgtatgtcgtactacgatgtgatcaagatgaataaccaattgttgatgcaattgatcaatgacatcttggatatctcgaagatcgaggcggatgcgataaagatcacatatgagcaattagatgtcagtgaattgatggatacgatttatgcttccgccaagttacgggttccgggaggagtcaagttggttttggagaaagaggctgaccaccatatgttcggtacggatagcatgcgtctgttgcagttgattaataatttggtgaacaacgctatcaagaacacgaaagaaggtagcatcacgatgggatataccattcaaccggatgatcaattacgtttttacgtaagggatacgggaatcggcatcgataaggaaaaattgaaagatgtcttcgaccgtttcgtgaaaataaacgactatatggaaggaatcggattaggactggctatctgcaaaggattggttgtgaagatgggaggttcgatacatgttacgtctgaattaggggtgggttcggagttctcctttattttgccgtctcatgaatagccctatttgtaatagcgcttataaatctggtcgtataatccactgtctttgatttgctggagccaactatttaggctatccagtaggacaggagagtctttacggaccgcccacgattgcaattgggtaaaactgacatccgttaggatatcgacttccggcagttttttctgggtcatgcgggcgatttgttggtcgcatacggcataatcgatatcgcctttggctaccatgatcataagctgctcggtagaatataactcatcttccaccacgtagatcgtatcgcctatctcgtgtcccagattttgcagacgcaataaggccggggaatctttcggtatgtataaagtcttttgggctaaatccaattggttacggataggggcttgtccgttgttcgcctctgccgtacgttgtaccaagacttgcttgttgagaacgatcggttcggtgaacaggtagttttcccgcatctcggaggtgatgggtatgtttcttgcgattacgtcgcatttgttgtccgataattcctcgaagcttttcgctaaactcatttccaaatgcgtctgaacctccaatccggataatttagcgatcgcttggctaagctcgtattgaaaaccttgcaccgtatcgccggatacgaaatatccggattgattgtactcggttatcatccgaagaattccttcttccttgatttccggataatcacgaggtccgatctcttggggacgttggttaagtctccaaagctgtaccattgtcactacagcgacaatcagtagaaaagcgtataggataagcaacttcttagatctcatggcaatcgattaattattgaaagtcacggagatacccattttcaagaccatcgggtccaacggataatgcgcaagagagaagtaattcgggtcaacgaacttagagcctagattgtatgccatgatgaagaagcgagcttgcttcaaatggaaattcgcataagcgttgatcaacggataattaccgaccttcactttcttgtcttcttcctgtacttggaactgctgggtagccggctcgtaataaggagcgtaataagcggtgttgtagtatacgttcgcgccaatctgtacggttaatactttcgccaacttaaacgctagatatatattcgagtatgcgctgatatccggcaacggaagttgagacttctcgctagaaagctgataggccacctcattctcccatccgaacgcacgatacatgatatcttgcttgatacgggctgagacaacttggatgttcttactgctttgctccggcaaacctttgccgttgaagaatacataattctggatactttccactcctccggataactgggtacgggtggattccaagttgattttcgctccggcgtaaatcctttgcacatttttcaatgatagatcccaccaatagtaacgcccatgatggtgacgttggtagaacgccggggtgatgttcttgatgtatccttccgccttgatcgtagcgtctttcttaaaaagtttgaattttgtttgcaggtctccgctcactcggacctctccggcgtcacttcccgcaagtcctaattctccacggacattgtaggtaagaaggctaccacggcgtttggataattcgccgccgatgtaggtagtaaactcatcatatacttcggaagtagggaaatttaatgtgcttggctcagagcttccatgaccatccggaccgtagtccagtccgggaacttgggatgccaatctaaaccggcgtttctcgaaagtaacgaaggcggtcagcccgaacttagcccaatcttggaaaccttcccgcaaggccaacgcaaaggtattctttaaattccaagaggaagtctggtcattcaaagatgcgtccataccataaagatgagtgtagcaggtatcgatcccggcatcattagagataaagcgtctgcggttatcttcgtaatcgatggtatggatgatactggaaaccggaatgaatacctcttttacgttcccttcctcatcggtttcttccaattccttagtaaaaccgagattgtatctctgtgtcaggaaatattgttttccacggacacggttccatgtgtccgtgtaacggacagggtatgatttactatcgatatttctttgattctcggccaagtcatcgggattcgtgatatactggtcatttgtaagtccaccgttctcgtagtttacgaaattgaaattacttaaataagcgtttaactcgtaacggtcggtgatataacttccgaaaaaacgataacttaataatttattaccgttggagttataatatccgcggctatagatataatccatctcgccaccgacattgatctttttgccaaagttcatggtcaatacccctttcagtcggtccatcttattctggctggctcctcctgtcgtataagtcacttgggtatagggtactttggtatcgtagaaataagcgtttgttggggttgtgatataataatcataggcatcggcgaagatgaaatcacgttcctccttacgttcgttaaaaatacgggtttgcgccggcgatcccacattcgccagataacctacggccaatgagttcgcttccaccaacgtactattcccgaaatttaatcgattggtatccataggagcgatataacgttctcccaaaagaggcgtgagccgataaccgatgattcgttttgatttcagcgccgcgctatctgtttgcagcaagctatccggtatttccttgtttgaggatgataaattagataacgagaatccacctcgtcctccccggctcccggaacgtccttgcgcatgcgcggaagccgccgttcctatcagaaaaagtaatatgtatagataatacttcatgggttgcaaatatataacaaaaaataatgtgccaattataaaatatgccaatatgccaatcagaaaacttaattggcatatcggcacatcaatgaatgagcttcttatattttctgtataatctccattcctttcttaatggcagcctcgttcatcggcaacaaatgatggtgacgctcgggcaaggatttcttcaatcctagcatgacgttctccaattgaaccatcgggacgatattaagcaacccgcctaagatcaacatattgaatgccttctcgttcttcatctcggtagcggcgtccatggcatctacccgatatacgttaatatccgtacgtttcgctggcgtatggatgccataaccatcgtaaatcaagataccgcccggtttcaccttgctctcgaacttatccatggaaggttggttcaagataatagcgatatcatattcattcaatacgggtgagctgatacgctcgtcgctcaagataacggttacgttggccgtaccgccacgttgctcaggtccgtatgaaggcatccagctaacctccttgccttccatcaaaccggaataggccaagatcttacccatagacaatacaccttgtccaccgaagcctgctataattatttcttgtttcattgtcgtttaccgtattacttattcaacattctttaagtcgcccagcgggtagaaagggaacatgttcgcttccatccatttattggctttttccggagtcatcttccagccggatgagcaagtggagacgaactctaccacagaagtacccttaccggccatagcgttctcgaaagccttacgaagcatcttcttcgctttccgtacggctgcggccgtctgtacgctttggcgtgttaccaagcaagttccttccaattgggctaataaatcaccgatcttcagcgggtaaccgttcaaggcgatgttgcgtccgtaaggacaggtagccgtgggcataccttccagtgtagtcggagccatctgtccgccggtcataccatagatcgcgttatttacgaatacgatcacgatattctcgccacggttggctgcatgaatcgtctcggccgtaccgatagccgccaagtcaccatctccttgatacgtgaataccatcttctccggattcaagcgtttaacagcagaagctatggctggcgcacgtccgtgggctgcctcgatccaatcgatatccaagtagttatatgcgaatacggcacatcccacgggggagataccgattgtcttatcttccagacccatatcggctataacctcggcgattaacttatgtatcacaccgtggctgcaaccggggcagtagtgcatgggattttcattcatcaatctgggcttttcatacaccagattttccggtttaattatatcgttgagttccataatctttaattattaatgtatatatcttaagacatattgcaccagccgcaatacgatcgccgccccgccacaatacaagaatacggccttatcgctaacagcgaagtaacataccacggcagctatggccagtagcataaaaaccagcgtcaatatctcgtcagctttacttcctcgtgtcatacggatcagaataatttttccttcagcgcgttcaatacctcatccggggtgaatacgattccacccaatcggccaaagtgctctaccttcaccttaccatttacggctaggcgaacgtcctctaccatctgtccggcgttcaactcaaccgataacataccttttaccttatccgcataagcggcgatcacttttgtcgggaacggccataacgtgatcgggcgtaacaagccaagcttgataccttccgcacgggcgatctcgactaccttctggcaaatacgggcggaagaaccgaacgcgatcaatagataatcagcgtcctcacattggaactcctcgtaacgaacctcgttttcctcgatcttgcgatatttcgcttggaaacgaatattgttctcttccatcttcgccgggtctagctccaaggaggtgatgacgttacctttgcgtccgcccttctttccttgtacggcccaaggacattgagcgataatctcttcctcggtacggcggggttgatagggaggcaataccaccttctccatcatctgtccgatgataccgtccgccaagataatagcggggttattgtatttgaaagccagatcaaaaccaaggcctacgaaatcggccatctcctgtacggaagagggagctaaggttatcaagcggtaatcgccatgaccaccgcctttcacggtctggaaataatcagcctgactcggctggatcgttcctaatccgggaccgccacgcataacgttcacgatcagacaaggaagctccgctcctgcgatataagagataccttcttgtttcaagctcacgcccggactggaagaagaggtcatcactttctttccagtgccggctccgccgtataccatattaatagcggctacctcgctctccgcttgtaagactaccatgccggtcttttcccacggcatctctgccataagggtttccaatatctccgactgcggagtgatcggatagccgaagtaaccgtccacgccatagcggatagccgcatgggcgatggcctcgttacccttcattaattttatatcttctgccatatcttgatataactttatatttttactttgtagatcgttagacaaccgtccggacaaactaacccgcaactagcgcaaccgatgcatgcgtccgggttcttcatgtacacatagtgataccccttgttgtttacttctcgtgggtgcaactccagcacatccgacgggcaggctactacgcaaaggttgcatcccttgcagcgctctgtgtttacaacaacagctccttttattttcgccataatacttgtttatttaaaatctaaatgtaacacatttctattgaggcatcaaagttagtaaaaaattactcgttgccaagattataacgtttcattttgttgaatagcgtctttctactgatatttaacacctcggcgactagggtacggttatagttacttttgatacttctttatcactttattagtatagagaggatttcgcttattggaaaagtacgatgtgcgatgataaaatgtaggcaaataagaatgggcattctaatcaccttataatgcccattgtaatattgggttacgccttagtgcttttttgtgagagcttttctaggaaatatacgatcccgaaacctaagatcatcaatccgacggcctcccaaacaaactgattcggagcgatattcgcctcaaccaacggcttggtcatgccatggctatccacataggtctcgatcgtttctttccaaggccataccttgttaagcgaacccaacatgaatccggccaatacggcgatcgttatatcatggaatttacgaagggcgaatgacaacacgcgggagaacgtcgtgataccaatagccgcacccgctataaacaccaacataacgggaacgttaaacgtcttgaccgcctccatgatatagaagtattttccgagcaacactaagataaagctacccgagatacccggcaagatcatggcgcaaatggcgatcgccccacagaggaagataaagagtaaattactcggagtctcggcgggagtcgccacggtgatataaaaagcgatcaccgctccgacaacaaaactcaagatcgtcttccagttccattgcttgatatccttagagacgaaccaagtagaggccagcaccaaaccaaagaaaaaagaccataccaagatcggatgatacaccaagagatacgtaatgatcttcgctagggagaatatactaataccaataccacccacgatagaaagcaagaaattagcgttgatccctttccagaaggccgctattttccccgtgaataattgtttcaatgtcgtcccgttaatacttttgatagagtcgatcagttcctcgtagatacctacgataaaggcgatcgttcctcccgacacgccgggaacgacatccgccgctcccatacccataccttttaatactaaaaaaccgtagtccttgagatttcgtttgttaggcatattacattattaattgtctaattactgttatctttattctttaaaaactcttttaccagatcctcgggttggatatgtttcttctctttatcgggatcgatggtaaagtccgcgaatacttccggtcccactttacgaagcaaataaagaagatcatctccggatatttggccgatatgctccatgaaattttccatatcacggttatccagataagccatagccaaatggatatgaatcattggagtcttcgggttgatttgaaggactttcttgtaataagagatcgccttatctacatctcccttagaaagcaaatattgtccggcatgaagcaggctgttgcattcttcttgagtttccggattgatgcttttcttatcgatgatcttgaatatcttattcgtaatagcgatagcctcctcctttttcccgctatcaagcaagcaaagcgctaaaagagaaaggagacggacattgttcggatacaattgcgccgccttgaataacatgatggaagcctcgttgtcacgctcagtctcggtacaacaacggatataattgatataattggtcggcccatcctccatatccggatcgtttatgatcgtggaaaacagttggtaagccttctcatattgctccagcttcatataacattccgccatgagtggagagatacggcgcatcacctcctcatcaccctcgatttcttgatattcctcgatcgccttctcatagctctcgttcatatacaggcagtacgctttcaatattttcagttccgtatcggaatcatcacatgtcaaggcgaagtcgaaagcctcgatcgctttctcgtaatcgccaaccatggaatgtagccttcccagcgtaaaccaatactcgtatgagaaaggattcttatcgattagctcattacataactcgatcgcccggggaacgtctccttccgtctcgaggatgtagcaaagctcattcttaaggatcaagttatccggaaataaagccaagccacggtccacgaaatcgcgggcctctttgttcatgtctaaatcattcaagatgggggagatgtactcgaagacttcctccaaatagtcacaatccctagtgatcaactcttccgtgatctccagaaccttgggatattggttgagcgagcaatagcattccatttttaacatatccagatcttggttatcagtctccgctatattctcgagcagagcgagagcgctctcataatcctcgttatatgcgaattgcctgcctttcttgatttgcaaggcggaattaccgggatgaagctttagcccgagggctaagacttcatcaaagtaagtataatcgttcgaatcttcaaagctgtccaacatttcatcgatttgatcagcgtcgaaataaggctccttaccctcttccttcgctgaaagataatgttgtaacaagcgtgagatatcgtcttttttcatttactattctttatttattaatcttgctccacgtgtcctttagccctacggtacggttgaataccaagttgtcgggggtggattcgctatctatgttgaaatagccgatacgctggaattgaaggtaggagagcttgggcaaggtagccacgaacttctctacgtaacagtttttccggatctccaaggagttcgggttgatgatttccttcatcgcctctagcggggagcaattcttctcctcccggatagcggccaattcgtctctggggttctccaccttccaaaggcggtcgtataagcgtacttccgctttttggcaatgggcgcagcttacccagtgcaaggtaccttttactttacggttagcgtccggcataccgctgcgggtattcggatcgtattcgcaatatacctcggtaatctcaccgttctcgtctttcttacagcccgtacattttacgatataggcgttcttcagacgaacttcctgtcccggtgtcatccggaaatatttcttgggagcgtcttccatgaaatcctcacgttccatccacaactcacggctgaactcgatcgtatggctgccggcttccggatcttccgggttgttgatcgcttccagctcctcgacctgtccttccggatagttggtgataatcagtttcaccggattgatcacggcggatacacggatggcgcgggcattcagatcctcgcgtacggcgctttccagcaaggcgaactcgttcagggcgtcgtaagtcgtataaccgatcttgtcgatgaacttacggatagactccggagagtaaccccggcggcggaaaccgcagatggtcggcatacggggatcatcccaaccgtttaccaagttctcttttaccaatgtaagcaggttacgcttgctcatcagcgtgtagcttaggttcaatttgttgaactcagtttgtcgggggcggttgtcgttcaagtcctcgccttccttcagccagtcgataaataaatcatacagaggacggtgtacgacaaactccaaggtacacaaggaatgcgtcacgccctcgaagaaatcgctctgtccgtgggcaaagtcgtacatcggatacgctttccacgtcgtgcccgtacgatggtgcggatggttaaccacccgatagatgatcggatcgcggaagtgcatgttcgggtttgccatgtcgatcttcgcgcgaagtaccatggcaccttccgctatctcacccgtgttcatcttcttgaagagagctaagctttcctcgatcgggcggttgcgatacgggctctcgatgcccggttgtgtaggcgtgcccttttgctgggctatttgttcggatgtctgctcgtcaatatatgctttaccttcctcgatgaggcggatcgcgaaatcccacaattgctggaagtagtcggatgcgtaataaatatttccccactgatatcccagccattggatatcctccttgatcgcctccacgtattcctcatcctccttcgtcgggttcgtgtcgtcgaaacggaggttgcagataccgccatggcgttcagcgatgccgaaatctaggcaaatggccttcgcgtggccgatgtgaaggtatccgttgggctcgggcgggaaacgggtttgtacacgtcctccgttcttgccttccgctaaatctttctctacggctgcctcaatgaaattcaggttcttcttgctttcttcttcgtttgtattgatatcgctcatacttaaaaattgatagtttttcttcgaatggggcaaaggtagcgatttctttttaaaataggctgatgagcagggctatatttaggacggttaccatcgttcccagcagcaagaggatgatggtcgtagagcggctgttcgcgtagacacccatgaccttcttgctggaagtgaggtacacttgcgtgaagaccgtgatcggcaattgcacgctcaacaacatctgcgacaggatcaatcccttgaacggatcgccgatcaggaagatgatggccaaggcggggacgaacgatagcaggactcccagcttggagtggaggtcggtatgattgtatgcctcgccatagaatccggcgaagatggaagccccggcgataccggatgtgatggtcgaggatatgcccgccagtaatagggcggcggcgaaaatcaccccggcgttatttcctacgaggggtaccaataactgttgcgcttggtccagctcgtctacggcgatgttttgcttgaagaaggtagaggcggccaagatgatcatcgccgagttgatcgcccagccgatcaccatggacaggagcgtgtcgtagaactcgtacttcagttgtttcttgatgaccgactcgtcctctaggttccattcccggctctgtatcacctccgagtgcaggaacaggttgtgaggcatcacgacggctcccagtacgctcatgatgatcagcatggagttctcggggaaggtgggtttcacccagcctaccacggcctgcccccagtctacgtcgaccaacgctagctcgtataggaacgagagcccgataatggacacgaacgtgatgatccagcgttcggtcttgctgtatgtattactgaatagcatggcgaggcatacgatggtgacgatcaccgctcccgccttgatcggcataccgaacagcatccggagggcgatggctccaccgagtatctcggcgagggaggtggatatgctggcgagcatggccgatcctaggatcgggcggcttagcacgcgcggcatgtatttgttggtcgcctccgagaggcagaggccggtcacgataccgaggtgggccacgttgtgctggataatgatcagcatgacggacgagaaggtgacgacccacaggagggcgtagccgaactcggagcctgccgcgagattcgtcgcccagtttccgggatcgataaagcctacggtgacgagtaatccggggccgatatattttagcaaatccaatgccccggagcgggggcggtggttgatcttcagtttgtctagtaagttcatgtttgtatggatacttttaaattaaaaaaacagcgtaaagatacgaatagttttgttgttacctaacggtggccggaaatacgttcggacggccgatggcgggtatccgtacggctgtcctcttgtagctgcccggctgtccgtccgtatccgtacggctgcaaagatgtagctactcggatacaaagatgtagctactcggatacggatgggcagctgtacggatatgcggtcgtacccgtacggtcgcgcccgtgtatccgggcttgtgtgtccgcgtatccgcccggccgcgtgtccgcgtttatgcggatacggtaaacgagctacgggaatgtcaacacgaaggtggtctgccgctgggccgggttgcttctcaatgcgatgctgccgccggacaagcgcatgatctgccgtgagatggacagcccgataccgcttccgccttctttcgtggtgaagaacggcacgaatatatgctcggcttcctcgggggggatgatagggccgttgttcgtcacttctaggataacggcctcgttggggtcgcaatacgccttgaacaagataagcccgttttcttgctcgtgcccgatcgcttgcatggcgttcttcaagaggttcaagactacttgcgtgatcaggttctcgtcggcgtagacgatcaagtcctccggttccacgtcgatacgaatggttatgttcgggtagttattgtgatgacgggccaaccgcgtgagccgttcggcgaacttattgacgtagaataaagagggctgaggagtcggtatatgcgtaaacttacggtacgactcgacgaacgcgatcaagctcttcccggtagagctgattacctccaaaccgcctcgtatctcctcgtcaatattctgatggagggaaagcaaggtgtcgctcaaggaggtgataggggtgacggagttcatgatctcatgggtcaagacccgtgtcagccgtatccatgactcgatctccttatcgtccagctcgctgttgatatcattgatcgcgatgatgcggacgtgtttctcttggagcgtcatctcggagacacggaccgagagatgtaccgtgccacgctcgttgataaaagagatctgatgtttctcgccgggacgaacgtcgctgatgaggcgctctagattctcgtcgatgcgtccgagctggcgggcatgggtaaagaccgtcaatcccagcagtcgcaaggcctcgttgttggtctggaaaatattgcccttatcatcttctacgatgatacccgtattcacttggttcatgatcaactcgtaatatttctctttctggatcgcctcggctttcgcttgaaaaagtatctgggtgatgcggtttaaggactcgctaaccagcttgtcgttggaggaacgcccccgggtagcgtatttgaaggcgtaatcgctattgtcgatcgcgtcgaacatgaaggctaccttttgtgcgttccgcttgaacaaaaggctgatgccccgcaaggcagccatccatccgatgcctaagaacaggaaccatccccattcttccaccaaggccaagtaggtgagtgccgccgtcagcccgatagcgagggcgaggcggaaggtgaggctgtaataaatgcctttaaagttcataccgcttgatcttattgtaaagcgtttgccgtgagattcccaactggttcgccacgagcgagagattgccgccgaatttatccatggcggccttgatcattgtatactccatttcctcgagcgtagtgatgtcattcttgacgggcacctcccgcttacggggaaaatcgaaattgctgccatctaaagtatcaccgtcggcgatgataatcgctttctccacggtatgttccagttcgcggatattacccagccaaggttgggctttcagtttttccttggcgtcgtcggtgagagccatgggctttttaccatagatgttggtatatttcgtgatgaatatttcggtaagcggtacgatatcctccggccgctccctcaagggcgggatctctacgtgtatcgtattgatacgatacagcaagtcctcgcggaattgctctttctgtaccatctcctgcaagtcccggttcgtggcgcagatcaggcggatattgatggggatcggggtattgctacctacccgtacgatgctccggcgttgcaaggcggtcaataatttggcttgcaaatgataagacaggttcccgatctcgtcgaggaacaagcttccgttgttcgctacctcgaacttaccggggcgatccgtccgggcgtcggtgaaggccccttttacgtgtccgaacagctcgctctcgaacagcgtctccgtgatagcgcccatatccaccggtaccatggcctcatccttgcggggggatagcaggtgtatttcccgggccagcatttccttaccggttccgttctctcccgtgattaatatattggcgtctgtcttggctactttctctatcagcatccgtagttgctgcatggcgttgctgtctccccagaacataccgctttccttggataccaactgcttgttgccgacaccgcctttatgattggccgagcggatttggtaagcggcttgcaaggtttccaataatttagcgttgtcccaaggctttaccacgaaatcggtagccccttccttgattcctcgtaccgccagatcgatgtcggcgtaggcggtaaagagaacgacttgtatcgagggataagccttcttgatctcggagagccagaacaacccctcgttgccgctgtttataccggcgctgaaattcatgtcgagcaatacgacatccacgttctcgtcgtgcagcgtgttttttatcttgttcggggtagagatggtgataaccttctcgaagcaagttcctaacagcatttgtacggcggtcaggatacctttattatcatccacaactagtatagtgccttgttttgccatgtcatgtccatttatacgggcaaagatactcgatctggtcgatacttcctaaaccagatacatcctatttctgtttcatataccgtatggataaagaaataacgaatataaatggtcagacgggagggaatatcccggatggcttgccaatccctagccgttattgggcgatcctagcgattgggcttggtgttaccgtgtcggtgttggatggggcgatcgcaaacgtggctttacctacgattgccggcgatctccatacgagtccgtctgcttctatatgggtggtgaacgcttatcagttggcgatcacgatttctttgctgtcgttatcgtcgatgggagagatctgggggtatcggaaggtgtatacgatcgggttgctgttatttagctgtacctctttggcctgcgctttatccgattccttgtttacgctgattatcgcccgtacgctacaaggttttggcgccgctgccatagcgagcgtgaatacggccttgatccgtattatttatcccaaacgttttctggggcgaggtatggggattaatgccttggtggtatccgtatcggccgccgctggtcctacgatagccgctggtatattgtccgtggggaactggccttggttgttcgctataaatatcccgataggtattaccgctttgatattgagctttaagttcttgccgcaaaatccggtgaaggctgtcggacgtaagtttgatgttacggcggcactcatgaacgcattgacattcggtttggtgatagcgattatcgaggcgttcacgcatgatgtacatatctcattgataatagcggcgattgttatcgtattgttctgtgggtatttctatatccggagagaggaacggcaggcatatccattattgccgatagacttgctgcgtattcctctttttaccctttctatcattacgtctgtgttttctttcatcgctcagatgctggctatggtctctttcccgtttttcttgcagcgggtactgggacgcgatgaggtggcgaccggcttattattgactccttggcctttggcgacaatggtgtgcgcccctttggccgggatcttgtcggagaaaatgaatgccggggtcttgagtggtatcgggttgattatcttctcgggagggttgttctcgttggtggaattaccggcgcatccttccgatctggatattatctggcgcatggcgctttgcggttgtggcttcgggttgttccagactcctaacaatagcctcatgatcggggccgctccggaaagtaggagtggaggggctagtggcatgttgggtacggcccgtttgctgggacaaacttgcggggcttcgctggtagccttgatgtttaagttatttcccggccatagcatgcccgcggcgttatggctgggaagggtgttggccttgatcggggcggttattagtttctcccggatcaatcgtaaggcttgatcggattaggcgagatgcgattttacctgcattttcgcccggtatcccagcaggcatacagagcataagaagcctaatgggtaagccatccaaatcccggcgataccccaatggaatgtgaatcccaatagatatccggcaggtatggctatgatgaaataagcgagaaacgagatccacataatcgctttcacgtcggctagccctcgtaaggagttcgctaaaatgatttgtgcgctgtctcctatttgatagagcatcaatatggggagtagtgtcttcacgattgcgttgacatgaagattatccgtaaatattaatccaagccaggattgggtcatgaataaggtggtgcagacaatacaaacgacaataagccctagatgaagcccggcaatggtgatcttacgcaccatataccagtcgttcgcccctttataataactggtacgaatcgctacggcggctccaagacctaaatagatggtaaaactgatcgttgatatggtaatggctatttgatgggcggcaagctcaaggctacccagccaacccaccatgatggcggtgacgcagaatgttcccgcttccaagccttgttgcagactgatcggccagcctatggaattcagccttctccaactttgcttattgatacgaatatgggtgaaacctttccggtaaggcttatagtcggttcgcagcatgaatacggcgatgaaaagcaatagcatgatgatacgcgagataaaggtgcttatacctgccccgagcagtccgagttccggcattccgcattttccgtaaatgaggatatagttgccgatgatattcagcagattccctgtcaataggacccacatggatatggatgggttggctatgccttccacgaattgacggaatgaattataaagcattacgaatatgatcgagactaatgagactgcgaaataaggtcttatcaatggcaagagttcttcgggttggcctaaagagtctaggtttaggtaaatccccagtaagacggctatcaataataaggtggtagtcatattggcaaccagactgtttttgagccagcctccgatcacgatctttttattcatcgctaaattctgtccgatcagcggggtaagattataggagaatccggttcccattatgataaatgcgtttattacattattgacgaacgatgccgccgctagttcctccgtactgtgttgtcccaccatgatggtgtctgccaatccggtgatgatagcccccaattgtccaatgatgataggtacccctagcattactaaggatttataatattgtttgtaacccgctattctattgtacatatgtattgttctgttattaatgatggtgtaaaaatccttgatcgtatatgccggatatacgatagagttgttttaaatgaaaatgtaaagataaattagaaggaatagggtgcggatacggtagagcctctcgtagtccaatggacgaacaagatgcttttagtcgtaaaaaaataatattcgaatttacagctcatacctcttctttgatttagcggcgcaaaattacgtaaaatcactggaatccgcaaaccttcaaaattacctttgtttttgggatcgcactttttttatatctttacggatataagataaatgaatgattatggatcagttcgtagaacaattaaggcaggtgtctcctttatcagatgagatcgtggggcagctgttggaagaaatgaaagaggtttcttttgctaagggagaattatcgattcgggagggagaaagagatccgttcgtttggttcgtgaaaaccggattggtccgggctttcgtggagcgtgaggggaaagatatctcgttatggttcgcctcagatagcgaggtgatcaattttgtttatcggaatatctccgcctataatgttcaaatggtggagaatacgacattattgagaataccgaaaacgaaattggattacctatgccggagctcccttgagttggccaattgggggttgaaaatacaagattactatcttcgggaatatgagaactattttataaacgatagttggatggaagctcgtgaacaatatgagtcattgctgaaaacccgtccggacttgatcttgaaactacccttgaaacatatcgcctcctatttacagataaccccacagtcattgagccgtatccgtgcttccgtaaaaaaatagggaaaagtcattatttatcatagggtaatttttcttgttttcaatagccatatcttcgcgtcgttaaaaacgtgaggtggataatatgaaaatgagtggagaaaaggcgatccatcgccaagagttggagcgtggtttactaacccaaaagatttcaagactatttctgaaatatacgataccgggagtagccggcctattattcctcgggattcagtcggtgattgatggtgtgatattagggcggtttgtcggggcgaacgctttggccagcgtgaatctgatcttaccttgctatagtttgatgacggctttgtctatcgtgataggagtagggtgtcagaccttgatcggtataaacctcggacgtttggatcggcaagaggcgaataacgctataactacctcgttcttgtttcttggaggaatatccgttttgattagcgggttgatttatatattcgccggagatattgcccgtatgttaggtgcgaatgacgtattggttacgggagccgtggattatattcgttcccttgtcccgtttttccctttattatcattgatgttcttaggagattatatgattaaggcgatggggcatccgctttatgccatgatcgtaatgggaagtacggtgttgattaatatcggtctggatcttttgtttatcccggtaatgggtttagggattaagggggcgggattggctacaggtttggcctttaccttgggagcgctgttcaatattccccggatgttccagcgagggcaagtcgtagcggtacaaagaggacgtttccgttggcctttggtctggaatgcgttatacaatggctcttcggaaggaatatccgagctatctgccggaatcacgatttttttgttcaatataacgatgatgcgatatttaggagaggatggagtcgccgcctttacggcgattaactatatcttgtttatcgccaccacggtattcttagggatatccgatggaattataccgattatcagttataatttcggggcgggaagattggaccggatcgagaaagtgctgagattagcagggcgtgttaattttatgataggtataacgttattcgccatcttattctttttcgggcaacagatcacgtcctttttctttaagggaggagaggctttggacgctttggcgatcgctaattacggcataacgatttattgcttcaccttcttgatgagtgggctgaatatattggcctccagttatttcacggctatcggcaacgctaagctgtcggttgttatctctatgctgcgtagcttggtattcgtaacctttggtattatcgtttatccttctttattcggcatccaaagtatttggtataatgtaccggtggcggaattgtgtacgttatttatctcctttatgttggtaaggagagaacttttaaaagaggccgtgctgaaaaattaatcagcacaaccttcttaatttcttattcgatattcttccgtatcttggtcagatactctttcatcttctcggaatccttatccttgatgatttcttgcaggatatgcaattcctcttgtatccgctcgatttggcgaggggtacgggggttgaaaaggatctcggtcaatagaaaatcgtcctcggacaaaaggccgcgggcgattttcatatggcgtttgaaagtggtacccggggcatcctgatgcttcatcgtagcggcaaataccatagtggaggcgaaagggatacctagtgagtaggctaccactttatcgtgctcctcgaacgtgtattcgcagatatgcaggcggaggctggaataaatatccttgaagaagatcttgcccagatgatcgccctcggagataataatcgtattctctttctccagttgtcccagattagcgaatgtaggtccgaacatcgggtgagtggagacatacgggaaaccgcatgtctcataaaactccttcaaataagtcttcacggaagcgatatcggaaataatgcaatacggttgcaagtaaggcatcacggccttgaaagcctctatcgtgtaacttaacgttacgcagttgatgaccaactcgggattaaaatccttaacctcttccggtttttgtaggcgaagggcattatagataaaacgcatacgtttcggatctttctccaatacggctacctcatgatcaaaactaagcaggtcggtaaagaaagaacccatctttcctgcgcctaaaatcaatattttcatcttataaattattgttcgttcatgataatcatttgctggcgcacggattcctcatggatctccttcaagatctcctttacaaagtccgggctcaggtccatttgctcacccatgctggagcgcttctctaagatctcgctgtaacggggagactgtaagatcggcatgttgtgctctttcttataaacgccgatctccttggagatacgcatacgtttagccaaaagctccaataattgctcgtcgataccatcgatctggcggcgaagagcggtcaggttctcggtagtctggtttacgtcacggatcaccaataggttcaatacgtaatccaatacatccggggtgatttgctgggaagcgtcgctccatgcgcaatccgggttacaatgagactctacgatcaagccgtcgaaactcaagtccatcgcttgctggcaaagtggggctaccaactcacgcttaccaccaatgtgactaggatcacagaaaataggcaggtccggcatacggcggcgaagctcgataggaatatgccacaacggaaggttacggtagattttcttgtcgtatgagctgaaacctctatggatagcacccaaacgatgaatgcccgctccgtacaaacgctcgaacgctccgatccataactccaagtccgggttaaccgggttcttgatcaatacaggtacatcaaccccttttaacgcatcggcgatctcttggacagcgaatggatttaccgtcgtacgtgctccgatccaaaggatatcgataccggctttcaatgcctcgaatacatgatctttagtagcgacctcggtagataccagcatgccggtctcttttttcactttcttcaaccaagccaatccctcggctccgatgccctcgaatccacccggtttcgtacgaggcttccaaatacccgcacggaatatcttaacgcctctggaggctaatccttgggctgtttctaacacttgctcttctgtctcggcgctacaagggcctgcgattacgataggacgttgtgtgtcaactcccggtaatgctaacggttcaatcttcatttccatctttgtgatctatattttaattttcaattttcagttataaattctcaattctcttcaaggcttcttctaaagtctcgttcttgcagcaaagggagatacggatataacgctcgccacggctaccgaagataaatcccggcgtaaggaatacgtttgcctcgtatagcaccttgttggcgattgcctcgccgctctcggcggagtcggggatacgtccccaaaggaacatacctacttggttctcgtcgtactcgcatcccaaggtacgcatgatttgtccggcaaggtcccggcggctacgatagacacggttcatgttatcgtaccactctttctttgcgcttagggcctctaccgccgcatattgcatcggcttgaactgcccggagtcgatattgctttttaccttcagtatccattggacgaattgggcgttggaagccagcatcgccatacgccaacccggcatattatgagccttactcatggagttcatctcgatgcagatctctttggctcccggtatgcttaagatacttagcggatgctcattcaagatgaagctataggggttatcattacatataataataccgtgcttccggccgaaggccaccagtttctcgtatagctctacgctagcgttcgcccctgtgggcatattcgggtaattggtccacatcagctttacgttggagagatccattttctccagttcctcgaaatccggttgccatcccagttcctctttcagctcgtaagggatcaaacgggcctctaccagtttgctgacggaactatatgtcggatatcccgggttcggaaccagtacgccatcccccggattcaagaatgccagcgagatatgcaagataccttctttggagccgatgagcggctggatctctgttttcgggtccaagtctacgtcgtaccacgtcttgtaccagtcggcgaatcccttacgcagttccggtatgcccacgtacggctgataaccgtgctcgttcgctttacgggcatgttcacacaacgtctcgatggtctgttccgaaggtggaaggtcggggctacccacgccaaggttgatgacgttcttgcctgcggcattcatctcggctacttccttcaatttcttggagaagtagtattcctgtacgctacctacacggttagcgggtgtaatattacacactttgtcttccttctgcatattcgcctaatatttttaagtcttttgttaacggtctgatagcgtccaacgcttgtttgtagcgggtaaaatccgtgaaagtaaggtcgatgtagaacaagtattcccattcacgcccgataataggcaaggactgtattttagaaagattcatgtcgtaaaaagagagaacggagaggactttggaaaggctgccggaagtgtggggaagagcgaatacgagagaggatttgtttttatcggttcctcgaagcatctcatccgccgtccagcggtccgctatagcaaggaagcgggtgaaattccgtttgttagtctcgatcccctcggcaaggacttccatcttgtagatctgggcagccagtttcccgcatatcgccgcatgtcctttcagttggttctccgagatccaccgggcactcatggcggtatcctctttctctaccaccttggcgttgggcaaggtatccaagtaatcggtacattgcatcaatgcgatcgggtgggagttgacctccgttatatcatgtatagaggttcccggaagagctaccaaggaatgggagatacgtagcttatactcgccggtgacgctcagcccgctttcacggatcagctcatggttttgaaggaggcttcccgctatcgtattctcgatggccatcatgcccagtacggaagggtctttcttgatcgtcgtgataacatcccgaaacgtattgcaagggatgatttctatttcttcaccttcatgataattacgggcggcgatgtcgtgatacgaaccggctattccctgtattgctactttctttttcatcttgtttctctatttttactctaaactgttacaaacaaaaaaagtcccaccgaaaccggcaggactttatattttattgatatttatattcaatcatcaacgctttacatacaaactcctgcccttactctgctaaagtaaaagtaataaaagtaatatgtaaagctaaatcgattcattgtctgtttgtttttaaatacgcagcaaaagtaacgcttttttggaaactacaagcaaaaagtgatattttttttctgttacatttaaattttatcttaactgttcctgaacttctgtggagatacccctacgtaacgcttaaaatacttaccgaaaaaagatacgttcgggaagttcaaggagtaagatatctcttggatagtcaagtccgtagccatcaattgcgattttgcgtccatgattatcatatcggctatgatatcggatacggaacgtccggtcttttgcttgatgatcatgcagagatgctggggagaaatacttagttggctggcataaaaagccgtttgccgctttgaggtataattcttcatcaccagttggatgaatttcttgtggatctcgtcgctacgggtcgttatcttgttaggccatgattttccttgatacaaatcgctgatcccatggatcatggtaagcaggatatgtttcaccatctccctgtttatggatttctccttcacttgtacccgctctagcaggtggaaataatcgttaatgaagtccgcccggtcctcgttcaatgctatgaccggattctcgtagatagtaggtaaggcgctcatcgtagactttatcatgttcacgcagtccatgaactcggatgagaatcctataaaggaaaggcggaaactctctttctgctcacagaactgaataatgcttcccggcatcaaggtgatgaaatcattcggtttcaacgtgtactccgtcaagttgatggaagcccgtaaatttccttcaacgcataacacgaaaatacctgcttttaaccggcaagtctgcttgtaaaagtttaagattgcctcggtaatgtcgtttcctacgacataatcccggggcaaatctaattgtggtaagtttgcgttcatccgttattttattaatgatcgaacacaaaagtagtaaaagtgctgttgattcacttcttaatttaaaaatagaccaattaatccttgaatcagacttattccgcttgtgcttccttattccgtttatgcaagcttttcagttcgaaggatagcatgacacggaatatacctattattaataaggcataagcgatcatgtaaaccaacgtgaaggcccctagggcgggttgccagataacaccgatggagcaaaggatagccaagataccgaagaccatgtaccaaccccagttccgtgtgccgtatcgtttcaggtccatcgagtaaccggtagccgagaagcctctgaacataagccagaatgccaagacaaacggaagcacctccatgctaagtcccgggcttgccatcaagaatatacctaagatcaagtcgataatacctccggccaaataccatccccaactgctgatgccctttttgttcgccaaggcgaaagcgatctcgaacaagccgcttacgaacatagagacactgaataagatactaagcgctacgtagctcgccaatggcgcgaacattaaataaatagcgacgatgatgtaaagcagtccgaccaatagtgataaccaccaattcttgaccgcataatccattttatcaataaatgttttcatattggataatatttgtattgtaattacccaattaacaaagggaaggaagaaaaagttctgggtatttgtggctaggatatccttaaaaactttgtcctttggaaattaattcttttctttgacgtttcaaatcaatataggtatataagtacgaggattatgatgaaaaatttgatagcgataacttgttttgtcgtggcgttggtgtcttgtaataaggtggaacataagctggaagggaaatggcaattgaaaaccgtagaggcgaatggggtggtccagacggtggatacggtttggtataacttccagacctctttgttcgagtaccaattatatgacccggcaaaggacgtatatcgtacgaatttcggttataagacgttggagggagatacgagactggatctggagttggtcaactatggaggtacacctttggaacaattcatgcgttatacggattggacctcacctaaacaaactttcacgatcgagcagtcatctgtgacgaatctggtaatgagctgcgaaggaagaacgtatacgtttaagaaattctaagatatcatgtgctgtttgatctcagtccctcataaggagtactccagtactccctaagaagtactgcgatactctttgcgaagtactggagtacttcttacgaagtactctccgcggtgttagatcatgcgatcaaatccgcttctatagcttgtgccaccttgattaaatcggcgggggctatctgtatctgcaagcctcgttgtccggcgcttacatagatcttatcgaagccggatgccgtaggatggatatacgtagggaaatgctttttcatgccgataggcgagcatcctccccggatataaccggtaagcggtaacaactctttcacggggatcatctcacatttcttgttcccggataccttggccgcctttttcaagtccacctcgtccgctccggggatcacgcatacgaaataaccgctcttatcgccatgtaagatcaaggtcttgaatacttgggcgatatcttcccctagctgctccgctacatgcgtagcgctcagatcattttcatctacttcataaggcacgagctggtaggcgatcttagccttgtccagcaggcgtgccacgtttgtcttattaatcttctctttcatcgtttagatccctttcatggataattgaacacgttttctggataggtctacgcttagaaccttcaccttgacatgctgatggatggagaccacttgggtaggatcgcttacgaaacgatccgccagctcggagatatggacaagcccgttttccttgatccctacatcgacgaaacaaccgaagttggtgatgttggtcacgataccgggcaatacttgcccttctttcaaatcctcgatcgttttcaccgtaggatcgaacgcgaatacttggatcgtttggcggggatcacggcccggtttatccagttcctccatgatatcaagcaaggtaggcatcccgaccttatccgtaaggtagtccgttagttttagtttctttttaagcgctttgtcggtgatcaggtcggctaccgagcattttaggtccttggccatccgttcgacgatcgggtagctctcggggtgtacggccgagttgtccaacgggttctttccgtcgggtatccgtagaaatccggcgctttgttcgaaagccttctctcccatacgggggactttcatcagttctttccgggaagtgaagggtccgtgctccgcccggtaattcacgatgttttgcgctagcgtagggcctaatcccgagatgtaagtcaacaaatgcttgctcgccgtattcacgtttacacctactaaattcacgcaactctccacggtttgatccagactctttttcaaggcgttttgctctacgtcatgctggtattggccgacaccgatactcttcgggtcgatcttgaccaactcggccaaagggtccatcagccggcgaccgatgctgacagctccgcgtaccgtgacgtcgtattcgggaaactcctccctagcgatcttggacgcggagtagatagaggctccgttctcgctgactacgaacacttgtaccttgcggtcgtatcgtatattcgtgatgaactgctcggtctcacggctggccgtaccattaccgatggcaatggcatctatggcgtaagtggctactaactgggcgaccttagcggcggctttgcccttctcgttctggggcggatgcgggaagatcgcctcgttatgcagtaaattcccctgcgcatccagacagaccaacttacatccggtacggtatccggggtctacgcctaatacccgtttttgtcccaagggaggagcgagcagcaattgccggaggttctcggcaaatacccggatcgcctcctcatcggctttcgccttgctctggttggagaactccgtctcgatagagggtttcagcaggcgtttgaaagaatcgtcgacagctgtagccacttgctcggaaacctctccacgaccttttacgaaacgccggttcaagcgatccagacaagattccgcgtcgggagagatacttacacgaaggataccttccgcctctccccgtcggagagccaataagcgatgggaactggcccggttcaaaggctcgctgaaatcaaagtaatcccggtatttagcgccttcctcttctttccccttgatcactttggatgtgatcatggcggtatgagcgaaagagttacgtacggtattacgtgccgattcgttctcgttgatccattcggcgataatgtcccgtgccccttgcaaggcttcttcggcgtttttcacttcccccttgataaagctcttgatacgtgcggataggttattctcgttttgcatcataacgatcttagccaagggttccagtcctttccggcgtgcgatttccgccttggtgacccgtttcggtttgtaagggagatataaatcctcgatctcggtgctatcccaagactcctcgatgcgtttccggagctcgggagtaagtttcccttgctcttctatcgtggcgaggatcgtttcctttcgtttgctcagttccgtcagtttatccagttgatctttgatggcaccgatttgcacctcgtctaatcctccggtcacctctttccggtaacgacttataaaaggtatggtagcgccttcgttcaagagcccgattgtccgttccacttgtccttccggaatttgtagaaaacgggctataagcgtgtgaaatacgtttgtcatatctagttttcttagaattggagtacaaatatacggttttgcttatattttcggtcgggatgctcacttcttgggcttattatttgtatctttcattaattttcaagaattttacggccggaatattcaagcctttgattaaaaaaatcaacatggaagttaatactacggagaacaaaactttggaacaggattatagggatttagcaggattgttatctaatatcgtggactcgttgcccatctactttttcgtgaaggatacgggtgataatttcaggtacgtgtactccagccctttgatgaaccaactttacggacgatatcataatgatgtggtcgggaaaacagattttgacctatttctagatccggtcgtcgcccaatctttcagggatatggacgaggaggtggtgaaaacgggtaagatgcagcgtttcgtggagcaaatgatcgatccgaaaggtatcttgcgtactatggatacgatgaaactgctagcgccccgtgaggataagcctccttatttagtagggatttcatgggatattacaaagcaaaggcaggtcgaggaggagttgcatagttataataagcgcttggcgctcgcttgtcaagcgggtaagatctacccgtggctttgggatctggtaaacggtacggcggagctttccttggaagaaaacggccagatcaagcatgtgcagatcacccacgctagttttacggagaagatccatccggattaccggaaggtctatgagaatattacaaccgctttcatgcggggcgagatcgattccatgcgattcagtttcccttgtcgttatttctcggatgagtatgtatggttggagaagatcggtgaggtctatgaggccgatccggatggcaagccgatccgctcgatcggaatccttcgggatatgactgtcgataaacggcacgaggcggatgtgcaggccaagcgtttggcggaagagagcgaccggatgaagtccgcttttatcgctaacatgagccatgagatacgtacccctttaaatgccatcgtcggcttttccaccttattggcggagagtgacgatgaggaggaaaaaaaggaatatctgaggatcatagagagtagcaatgagtttttgttgcagttgatcggtgatatcttggatatctcgaagatcgagtcaggaaagatggagtttatttatacgaccctgcgtttgagtgaggtattcgctccccagcagcaagctttcgccttgagagtggccccgggtgtaaaggttatctttgagtcggacggtaatgactattgtattgtgtcggagaagacccgtttgactcaggttttgaccaatttcctttccaacgccgtgaagttcaccagctcgggttctatacggtttggttatcgtttgaccgatgatggtatctatgtctacgtaacggatacgggtatgggaatcagtaaggagtctcaagcgagcatattcaatcgtttcgtgaaattgaacagctttaagcaaggaacaggattaggtctttctatctgcaagacgattattgagaagttgaaaggtaaaatcggggttgagtcggaggagggaaagggctctacattctggtttacgataccttgccaaccgatgaaagtgaaataagacattcaagtttggttggaatttataggtaaatcacctcatccgccaacaaccgaatctcatccggattatgtgacgtgaaaagaatgatccgttcttctttcatttgcttttctcgtattcgttctataatacgatggcttaaggcttcatccaagcctttgaacggctcgtccatcaaaaggagaggagaagggtatgccaatgccctcgctatagcgatacgttgttgctgtccgtaactaagctctttaggatatcggttcccgaagggctccatttccatttcctgtaagtgtttttgggcaattcgccgggctttttcctccgtgagaaaagaggagagggggaggatgatattttcttctgcggttagatggggcaggagttgcggttgttggaatatggtggcgattccaaagtgtcttgtgggatgtatctctccttccgtaggcaataagatacctccgattaggtttaataacgttgtttttcctttgcctgaaggtgcgctaattccataaataatccctttttgaaaggaatgggaaaagtgctgtatgccgtattggtaacttatatctttcgtgtctaaaactgataatgtaggggctgggatggtctgatcctcattcgcgaaagatattttaggggtgatatcagcgactttgctaattcctttgtcaaaaaagaaactgatgaataccgccacgattgtccaagcgagtagctcagggacagcgataaagttttgcgcccttttcatctcgcttccgattccgaatgcgcattgcgacaagacttctcccataatgatcgcacgccagccgaatccggcggcggaggcaagtccgctatataagaatggctttagctgcgggtagatgatctggaataagacattggaacgtttgatatggaactgacgtgccataatggataaacccggacgtagatcgaggattccccgtgtcagattctctgttagtagcgggaacatggtgagaaaggcgatcatcaaagggatactttccggatttaggaatataagcgccaaaagtatgaaggatatgaccgggatcgagcgcatgatggcaagcagaggtctgaataattcatacacccactcaaaacgggcgaataacccggccatccctatcgcacaaacgaatgagatcgacatgcctaagattccccggaatatagtagctccgaccgactgatagaaactaccggagacgagccattcgcaaagtgtccgtacgagccggggaagtgaaggtatcagctccggttggttggctataacggcgaatagttgccatcccgccaagaggatagcggtagcgactatcgtagtgattgtttttcgcaatctcattgtttttcggggataaatccggcatcgggaagcctcccgccgacggccttgggttcatactgttcgatgagacgtaggaaacccatgacggcgtctttcgcctcgatagctgataaataatagattttacaccgctcgatactcttaggagttaaggccccttgggcgaagattccatgttcttccaaagaatggatggtctctttcggatatcgtacggctttttggcaggaggctcgtaaggcatcctcaaaagcgatacgatatttctccatcgtcggggtgtatacgaccgctgtttgggcgaatccgagggtatcgttgtctgttaagtgattcaagtccgcggttattcgtaagctgctgtctttccgtaaagcgatgcttagaaacggttccccgagcacggcacgatttacttttccggctaagatgccttgggtgatttccccggcggtattgaaggcgtaattcaaaggataatctaatcgttggcggccgagatagtaccgggtaaggatatcgggagtcgtaccgttgccgaatacatacaatgccggttctttcaagggagttttctcaacgaggtaaagggttccccagatcgggcaccccgctagtttgatcttgatccctttattgtacaagttcgccgcattgatcatggggagtacggctatgtcggtctcctgcttgatcagtaaggcttgcgccagatcaggcgagtctaccacttttacttgtacttttttgttatctataattggaggattctcaagccaatcggcgaatgcgataacggatggaccacgaagtaccgaaaccttgattacggtatcttccgtttgtgcgtgccggcaaccggagcaacaaagtatgaatagtagaaaaatgtatttaatcatatctagacctctataaaacaattaaggattgcctcccggcaacccctaaccaactttgttaaccttaaatctaatactattatgaaaaaaccacagtgcaaatgtactgttttctatatatctgtcaatagaataaatgctaattagtgttttgaggttcataagaaaagctaaaaagccttcttttgagtcgctaggctaaccaaaacaatcgttatcgccgataatggcaaagcaaataagatcggatctatcgcatgccacggatatacatcgatcaagacgtcttgtccgaataaagccttgcaaagtcctaccggagccgcttccgccttatgaaggaacaacatggcgaataaactggccaagcctcctacccataagctggccaaggccccttgccgggtagcccctttccaatatagcgagcagaaataggtaggtaggaatgtagccgcgcaaatacccatgaacaaggcggtgcctcgtgcgataatacttgcgcttagcgtatagcagataacgtagctgaccaagatagagcatagcacgccgatacgtacacctaatgtagagttcggatttttgctacgtcctagtttggggaatgcgtctgccccgaaagccgctcccatggtatgaaattgcgcgctaagggtagacatactggcagagagaatacaaagcatgaaaaccgccccgaaccactccggcatcgctttattgataaatagggggatgatcttgtccatatcttttaccgcctcggaggcgactacaccttccgtcttgaggaaaaacaaattagacaaggctcccacgtgataaatcgcccctaccgtgacaatcaagaacacgcagccgatcaatacgcccctgttgagttgcttggtactttccaccatcatgaagcgtacgactagttgtggctgcgctaagcaaccgattcctacgccaaggatcaatgaggtaaccaatgtataccattgtggagagcctgagatgggcatagctgtccatccttgatgtcccaaggccttgaagcgttcgggcaccatgggggcgatatccgtcaacttctggttcgcctcgataaagcccatgtccatgatatggtaaaaccaaaatagcaggaatagcatacaagcgaacatgataaccgcttgcaacgcatccgtataaagtactcccttgataccgcccgtaatcacgtaggccgctacgatcaaggtgaagatcaacaaggccagatgaaggtcgatgtgaaacatctgttcgatgaagacggctcctcccttcatcaccacggcggcgtagaggggcatgccgatgaaaatgatcgaggcgataaagatctgtatagaccgggacttatagtgtaatcccaataattgcgggaaagtccgtgcgttatgtgcctcgcctaacttccgggtccttcgtccgaaaaagataaaggctaccactacgcccatgaacatgttcaataagcaaagccattgaatacccatgccgaacgtagcggctacgccaccgaaaccaacgatcgccgatgccgagataaaggtcgccccgtaagacagggccatgataatggggtttacttttcgtccgcctaataaataatcactggcgtttttcgtctgcctgtatccgagataccctaaccaagcgattacaaacatgtaaataatgacaataatgcctaatgttagcgtactcattttcgtgattctttagtagggtttgttttttcgtcgtcttctttattccaagtggttatcccgaaccaaatagaaaataggaggcaggcgaacgctagaaggtaagccagccaaataccggggtcgctgattccgaacatatatccgtgcctattaaagttttattagatcactttcacagatatactcgagattctgacggcggattacctcacgggcgctttcccggttgttcgtacgcaagatcaagatcgctttttcccggatggagaaacaatacatatattctatgctgatgcccgctttcgtgaaataagataatgtattggcaaaacttccggcgcatgagctggttacgatcgctaatacgtcggtcaggtttgcgctgacgttgttttcttttaatatcttgtatgccttctggggatcgcttacgatgatacgaaggattccatactcggaggtgtcggctacggtggctgcgatgatgcggatgcgctcttccgccaataacgctaatatctcgcttaatttcccgtacttgttttctaggaaaatagaaatttgattgactgtcataaggtgttattttaattgtttatttaacaaagcttgcgatgatctttcactcgtaccgccttgccatctgtggttggcaaagatcccttggctaccagcttgatacgtggtgtaagtaataattcgtccttcaactgacgggtgatacctttcgtcaagcgctgcaaggcggaataatcatcggtgaataggtcgctcaactcaacctcgatcaacatctcgtcgctgttaccgatcgtttcgagggtgatcaaataattactgcctaactccttgaattgcatcaatatcttttcgatttggatggggaataggttcacgcccttcaagattatcatatcgtcgctacgtcctttgaaacgggctaggcgtttatgggtacgtccgcaagggcaatcacccggtaagatgcaagtaaggtcacgggtacgataacggagtaaaggcatcgcctcccggttgatggtcgttaataccaattctccgacctctccctcgggcaccggttgcaaggtaaccgggtctacgatctctacgatcacgttgtcttcccagatatgcaagccgttctgctccgtacattcgaacgctacacccggcccgttcatctccgacataccgaaacagttgtaagccttgacacccagaagctgctcgatgcgtttacgttgttcttccgagtgtggctcggcaccgatacatacggtgtgtagtttggtatcctttctggggtctattccctcctcatacataacctcagccaaacgagtggcatagctcggtatgatatgtaaacaggtggtgccgaaatcggtgatgaacttaatctgtcgtttggtattaccggccgccgcaggcactgtcaacgcacctaatttttctgctccatactggaaaccgaggccaccggtaaacatgccgtagccggatgtattctggaatacgtccgtatcccttagccctaccatatacatgcaacgagctacttggttagcccattggtccaagtccttggcggaatgtaagacaacggtaggattacctgtcgttccactggaagagtggatacgtacgcatttctgtaatgggatggcagccaatccgaacggatagttatttctaagatcatctttcgttgtaaacggaagtttttgtaaatcctccaaggactgaaaactgtccggggtaattcctttctctttgaatatcttatggtaaaaaggggagttgcccgctagttctatggtttgtttcagtcgttccagttggaattttaccagatctttacgatccatggtttctatttctttctgccaatacatcatcgttttttcaattagagtgtgtttaattcatgaaattagattgcaaatgtatcttttattttggataacgccatgcttttgtgtcaaaatattagtaatgaccttttgaaaataagaattattaggcggtaagccgttgtaaataaaaaaataatagttatttttgtccattacgcaatttaactttatgtatgggccatgggaaaatatgaccacctttccaaagaagagttgattcaaaggattgagagactggaagccgatctggaaaaagccactttgacaccatccgcgagcgataacgaacttgagatgcgccaaagccagcatacgatcaacttcttaaatatcttgatggatacgatcttgtcgaacgtatttgtggagatcacggtgaaagatattttcaacggtttccggtatatctattttaataaggcggcggaggaatttacgggggtcaaggcggaagatatcttagggaagacggatttcgagcttttccctgattcccggcgggcgcatgagatccgaacggaagattaccatacgatcaagacgggacgtatggtaaaggaaatggtcgagtatgagaaaccgaatggagaggtgagaatcgtaaatatcgtacgtttactgatcacgaatccggacccgggagcctcgcctctgttattggtcatgctgaatgatatcacggagcaacgtcaagaccagttggcgctgatgaaagtacaagaggcggataagatgaaaaacgcttttatcgctaatatgagccatgagatacggacccccctgaatgctatcgttggttttgcccatctcgtgacggaaacgactaatgccagtgagcaaagggaatacttttcgattataaataagaattgcgatttattgttgaaactgattaacgatatcttggatttgtcgaagatcgagtccggtcggttaaactataacgtgtcggaagttgagttgagggatatttgccaagaggcctatgtggtacaatccttgaagatgacttccgatgtggcattattatataactcggtcgccatgccttctgttcgtctgtggatcgatccgcaccgggtagaacaggtcttgttaaatctcttgtctaatgccattaagtttacttccaaaggttttatctcgcttttttatgaggtggaagatatgttcgtacgtgtctctgtcatggataccggaatcgggatatcagaggaaaagctggagtctgttttcgagcgtttcgtgaaattggatgatttttatcaaggggctggtttgggactaccgatctgcaagatgattgtagagcagttgggtggtgagatcggtgtgcgatctgagcttggcaaaggttccactttctggttcaccttaccattggttgttacggataaggctgttgtggagaaggatgatccttctgttttaagtgaatgtcaactatattaaataaaaaagaaatgaaaaatgcggttgtctttttagcgacaggctttgaggaaatagaggccttgggtacgattgatgtcttgaggcgtggtggtgtacgggttatgatggtatctattacgggtgaccgattggtgataggagctcatgatattccggtaatggctgattatctgttcgaggaggcggatttcagttgcgtcgatgccttgatcttgccgggtggaatacccggaagcaaccacttaaatgcgcatgcccatttgaaagaattagtcaaggagaaaacggaggaaggcgtattaatcggtgctatctgtgccggaccgatggttttaggtggtcttggattgctaaaagggaaaagggctacctgttttcctttcttcgagccaacaatggtaggcgctatccctacggataatggagtagagcaggatggaaatatcatcacaagcaaggggccgggttttatgtttgagtttggtttgacgatcttgaggaatctgaaagacgaggaaatcgctttggaagtggcggatgccttattatatgacgctttgttgcatgagacaaagcattaatgtgcttgaaattaaaatcccttgagagaatgtctctaagacattctctcaagggatttttgttgtaaagagttttccctttcctaaattatttctggaaagattttttcatacgtgcgatatctgtcaaatagtcttgcagatcttgctcgtgttcttcttcctcagctaagatatgcttagcgatatcacaagtcgtgaagtcgatgccgtccgtgaatttagcgatttcttgataacgcaagatggcgcaacgctcggaggcgacattctggttcagaaggcttactacgtcaaagtctgtcggtgaatcatatttgcatcgggctaattcaaaccattgtttcggatcaagtaccggaactccttccaattcgatgatccggtctgccaataattgggcgtgatgcctttcttcctcggcatgttcctcgaattcaccttgtacgtcggaacgcatggctccttcaacgaccaaggctcctacccaatattgatagtatgctagccattcttccgctaacgcggcgtttagttgagataataaattgtcgacatccaatttccctcttaaaattttgacgctttcttttgccatagctgtattaatttagaattaaacgtattgttcgttttttatagttctaacaagcttactagggcattgtttattgtttgtcaaaattttaacgttatgctgcgattgttacaatttaggtaattcccaaggtgcccggtaataggctttcgacaaggcggtagcctcgttatcgccgacaaacaaattgtttttatcatcccaatgaacttcccgttgaacccggcaggagatattcgccagatgagccatcttcgctacacgggcaccgatagcgacatcggcgttcggaagctcacggcttttaatgcagctcaacatgtttcccacatgattataaagtcctttgccttctcctttcttgaaaggaacggcttccatgcgggctacgttattggatacgactggtatgacttcccaaccggccctgtcgagtaccatcgtaccattctccccatagaacgctaatccttccttacggttatagagtccgtgattgattccacaggcgtgatcccagatgatattaaaatcatcgtaggcataagtcgccattaaagtatcgggtgtctccatagcgtcgttcggataggcgaacttgccaccgcctgagaatacacggctgggaaggcccgcgttcataccttctagggcataatccagtaaatgtacaccccagtccgacatcaagcctccggcataatcccagaaaaaacggaaattataatgaaagcgataaggattgaacggacgtttaggagccgggcctagccacatatcgtaatccacaccggcgggagcgtcgcaatccggtttaaccggaagtgtcggcttgccgtcttggtaagcccagaccttgaccgtacggatccgtccgatatttccggctttcaagaaattagccgcctcgtcccaatgcgggtcgctacgttgccattggcctacctgtacgatccggttatatttacgggcggctttttccatcaggttacattcctcgatcgtattggagagcggcttctctacatatacgtcttttcccgcttggcaagcccagaccgtcggaaggcaatgccaatggtccggcgtaccgataatgactacatctacgtctttattatcgattactcgtcgccagtccttatataagtgaggtacttttttccctgttttcttctcaacgtcggcagcccgtttgtttaaccattcgtcatcgacatcgcaaagagccacgcattccgtctccggataatcaagaaaagtattcaaatccccgtatcccatgctacggcatcctatgagggctacctttactttgttgctaggggcggtttgtccgtatatggaggaatacgatttaccgataagcggcgataaagtaagtccggacatgataagtccggttttttgcataaaagtacgtctgttcatgatattagtttttaatactgttataaatatattccatatccacgtgctcccttacgagggcggcgagtttatcatactgctcttccttaaaagcggcataatcgaaagggcctgtagtcgtttccgtgtcaaagccctcagctaagttgtccaatacggccggattatcaaggataccatgcatataacttccccagcatcggttgttgaggtaatatccgtccgttcgtccgtcttccagtcgggctacgggctgttcgggggcgtcgcccaataaggtggttcgtcccatatgtatttcgtatcctttacaatccttattctccgaggaggggaggaaagcaaagtcgctttgtctcgtgatcttctcctgctcgatgactgtgcattgaggcagaagaccgagaccgggaatcgccgggatatttccctcgatactttccggatcttccaagcggactcccatcatttgatagccaccgcaaataccgatcacctttttacccgctttatgcgcccggataatcgccatcgctatcccattggcccgcaggctttgtaagtccgataacgtattctttgagccggggagcaggatgatgtcggctttctctatctcatcgatattgttggtataatacggattgaaacgggggtccatctccaatacatcaaaatccgtgaaattagacattcgtttcagcaggatgatagctacattgattttcccgtctttataagtgttatttttcatatccaacgctacggaatcctcttcctctatcttgatatcccgaaaccatggaattacgccgaccacgggaatcccagtcaattcctttaataggctccgtccttcttcgaataaagaggcgtctccacggaacttattgatgataacccctttcattaacactcgttcctccggtcgtaataaagcgatcgttccatatacagagccgaatacgcccccacggtctatatccgcaactaaataggtagaggctccggcagcgatcgccatacgcatattggtgatatcccggtctcgcaggtttagttcggagatgcttccggctccttccaatacgatcgggttatagcgagcttccagacgcttgaaggcttcgatggcttccttaaatagctcctccttctggttttgtatcccgaaataatccttggcggacatattgccgactggctttccgtttaatacgacttgcgagcttttatcatttgtcggctttagtaatatcgggttcatatccgtatgcggggaaataccgcaggcctccgcttgtacgacttgcgcccggcccatctcgccgccttccggggtagagtaggaattgagggacatattttgtgccttgaacggtgccggttgataaccatcttgcttgaaaatacggcaaaacgccgcattgataacgcttttacccgcatcagagcaggttccgacaaacataatcggtcgtaggtgttgcttcatctgtatagattttatttacacagtgtacaaaggtagtatttttggcctttttattaaggagaagatatgaaaaaagaagaagattttgttatgggcctgtccatctacatggcttgtctgcgtgagaaaaaacggtattccacggcgaagagttatcaagatgccttgaactcgttcaagtgcttttgcggtatggaggcgattccttatgcctatattaataggaacaggcttttgtgctatcagtcatggttgttggacaagggccgttcgttgaatacggtgtccacctatatgcgtcggattcgtcacatttataacttggccgtggaggcgaacgaggctccctttgtacccaacctgttcaaagatgtcttcacgggcgttgaaagcaagcggaagaaggcgttgccgcgagagatgctggagcgtatgtttaacgccccgttgggggatccgtccttgcggcgtgtacagttgaccgttcggttgatgttcgcgttcagcgggatagcgtttgtggatctcacgcatttgaaatgggagaatatccgggatgggatattgcagtatcaccgacaaaagagcgggtctctcatacagctggagattccctccggggcgttgcggctgttggatgagttgtccgcttgtacggcaaaggaatccctttatttatttccttttttgagtggaaggagaaccggtgaggcggcctacaaagaatataacaggaccctgtcccgctttaaccgtgacttgaagttgttggcgagatcgacaggcgttacgcttccggtcacctcatatacgatccgtcattcattcgcctcgttcttgaaggaacaagatgtatcgatcgaggttatcagtgagttgttggggcataagtctattaagacaacacagatctatttgaagagcttctcgttggaacgtttgtcgacagtgaaccggaattgttttgagagcgtgtgtaaaccgatacccaaagtggggtaagaggcttgctactcgggaagtagcgtattctttcacggcgcaaaagtaataaaaaataacaaataacaagcaatcataaggcttagtttgttcattagtttgtgctccgaccttgattctccttaaatcttcgttcttattcctagtgcatagacatggcaatagagacgaaatgatctcgtatttcctacatcatcacgtccctcctaaaaatcgaacatacattcttgtagagacggggcgtgccccgtctcatcccctcaaaatggtattctaaattactgtcagacggtgggagacggagcacgctccgtctctacaactgggtaataaccattttccaaccttttaagctacttcccgagtagcttaatatttcaagcgatggtgattttcagaaaagccatttttaaagacataaagtgttgtttatcaggagtaaatatggttctcttggtagggctttgaattgtcgtgaggcttgagtggagatcctgctataatcttaggaaaagataatcataatgatgaatgttttgagagacggtcgctcggagaggggtacggcgcgggttggcaagcgtcatgacctgaagactgtacgctggtacgtgctcacgcttcctactacgggtgtggcacgacgcgacaggatcagccccgctaaaagcttggatgccgagctttcccggcgcaagcgtcgtggggagacgttgttcgagtatttcgccccctcctatgtggaggtgaggaaggtggacggaaagatggtcaacacgaagcggcccctgctgttcaactacgtgtttgtccggtcctcggttgaggagatcttccagatgaagcgcacgcttcccctatacaatttccttccccgggtctcttccggaggcatgactcatttcccttatctgtcggatgacgagatggggaatttacgttgggtggcggaatcttattccaacgagcttccggtgtacgtaccggacagcgaccgcttgctgaagggagaccgtgtgcgtatcacgtccggttattttaccggtatggaggcggaggtggtgatccagccgggtggcggtcataaagatgtgatggctcgtatcctcgattgcatgtgggtccccttgttggaggtgaagccgggcgagtatgagctgatcgagctgaacacaaagggtaagcacgtctatacccatctggataacgaccgtctgcgggagggtttgcacgatgccttgggacgttaccatgcctccggcagcgtatcagaggaggatactcgtttggcccgtgaggtgttgagatcctacggttcgctccgtgcggagacggacgtgatgcgttgcaagatctactcattgcttctttctgcctacaagttgttgggcgatgaggaggagttcacacgtttgcatgacacgatgtgtggtatgctcccggtggtgaaagctccgcaatcccgtgctttgttgcttgtgacgctctacggttgcacggacagcgccctttaccggcagatggcgcatgaggtggtggatccttggcggggtgagtcctcgcccaagaaaagcaagttatccttgatccgccggctggacgattgcgatcgctggctgaaacacgaaatcagttgacagttgacagttgacaagtgacagttgacagtttaaatcaaaaatcataaatcaaaaagaaatgtcttcccttccttctggcgttcgtttggtggcgttgctgaacgagcatttgagtgatatcatgagccgcgagcgaacgaacactgcttccatccatttgtattgcacgggtccttactgggtggcgttcgagtactcagcctatcagttgcgccgtgcgttcccggacagcgaggttacgccgatgcgcttgctcggctacccgtttcctgtggtgatggtatccgtgacggatcgttcgctccgctcgtatgcccgcaagcacatcttgcgaagagacgataaggattacaagcaattgaccgtccccggtttttccctgtctgattaccaaggctggcataagagagaggtggagggattgccattgctaagcgagaccgtatgagtgtggcatacgtataagggcatcgttttacacatatatcgacgtcgccccacacgtatatcggtgtaggcctatacgaacgtaggcgtgagtcgatgccgatatacgtgcgggatggaaccgatgccggggaaaacaggtgcaagtaatgcaagtaatgcagcacctttttcccacacacgcacgtgtacattatatatgtcgaatcaaactttcatacggctatccagcgtttctcatccggatcgttccatgccttgtttgtgatcgtttagtgtaaaattcttgttctatataatgtacgcacgtgtgtggaaaaaaggtgctgcattacttgcattatttgcattactagggcctatccataaggacatagatgtataaaaataataacaaaccagacatgtatcacagacaatcatttccccgtttgggcgattacatcgccacggttttacaagtcaccagactgaccaagtccattatccgcgtaagcggaggcattggcagtgacacttacaattcttttaaaaaggcaaggacatgcactttagcgtttactatcgtttggtagatctcctttgggaccatctgtcggacgaggaacttttccgccgtctggcacgtgaggccttggagcggtatatcgattataagaaagaggaggaaatgaacggaggaaagaaataatttaaggatgggctatgcaaatgagattaagttttaacctcgtgcctgccttcatcgactaattaactagccatgattttagaagagagttttggaaaatctactgattttatctcagatgggatgaacgccttcgagcgtaacgtgaagcgtataggggactgccttttggcctttatcgccttggtcgtattctcccctttgttcttgatctgttacatcgccgtaaggcgcgaggatggcggtcctgccattttcaagcaggagcgtatcggtcgtttcggtcgcccgttcaacatttataagttccgtagcatgcgtttggacgctgagaagtttggtcctgccctttacaagggaggtgcggatccccgcatgacccgtgtgggcaagttcctgcgcgagcatcatctggacgagctgcctcaattgtggaacgtcttcatcggcgacatggccttcatcggcccccgtccggagcgcaagttctacattgaccagatcatggaacgcgatccccgctatcgtttcttgtaccagatccgtccgggggtgacctcgtatgccacgctctacaacggctatacggatacgctggagaagatgcttcgtcgattacgctatgacttgttctatctggagcaccgctcgtggtggttcgatttcaagatattggtgaagacgttcttgaacatagcgttcgggaagaaattctagacaaagaaagcagggaatggtgattccattaaaatatcatgaaggaagttctgaaaggctggctcatcgacaatgcggtggtgacagtgaaggtccggatgagatctgacggacttggtaagtcactattacctgattgggtaaatggcttggaaatgtaccgtatcccatgccttgggacaaattgaacgtagtaataaatcaaacaacaatatgtcgaaagaaatcaagatcgctgtggccggaaccggttacgtgggattgagtatcgccactttgctggcgcagcatcatccggttatggcggtggacgtggtaccggagaaggtggagcaactgaaccgtaggcagtctcccatccaagatgagtatatcgagaaatacttggcagagaaggaattgcgattgacagctacattggatggtgcctccgcataccgtgatgccgatttcattgtcattgcggctcccacaaactacgacccggtaaggaattatttcgatacgcaccacatagaggatgtgatcgacttggtgttgagtgtcaatccccatgccgtgatggtgatcaagtccaccattcctgtaggctattgccggagcctttacctaaaatatgtcaataaggggattgagagtttcaacctgctgttctccccggagttcctgcgcgagagcaaggctctatacgataatctctatcccagccgtatcatcgttggttatccgaagctgatcgccgacgagcggttcaaggaagagaacgaggccatccgtcgcatcgccgatatttcggccttagaagaggctgcgcatacctttgccgccttgttgcgggagggggccatcaagcaggacatccccaccctgttcatgggcatgaaagaggcggaggcggtgaagctgttcgccaatacctatctggctttgcgtgtcagctatttcaatgagttggacacctacgctgaggtgaagggattggattcgcaagccatcatccaaggggtaggcttggatccccgtatcggtacgcattacaacaaccccagcttcggttatgggggctactgcctacccaaggatacgaagcaactgttggcaaattaccaagacataccccagaacatgatgaccgccatcgtggagagtaatcgtacccgcaaggacttcatcgccgatcagatattgcgcaaggccggctattacggctacagcgaccggaacgactttcaacactcggaggagaaggattgcgtgatcggaatctatcgcctgacgatgaaatcgaacagtgacaacttccgtcagtcttctatccaaggcgtgatgaagcgtatcaaggcgaaaggtgcccgtgtgatcgtctatgagccgacactggaggactgtagctcgttttttggcagtaccgtggtgaacgacctcgctaggtttaagaagatgagccatgctattatagccaatcgctatgatggttgcttggatgatgtggtgggcaaggtttatacgagggatatttttaggagggattaaggatttttattcgataagatgaggttcttgaaggaaaggctaggtaggaacaagaccgtattggccaatttctcttacttaagcatattgcaggtatttacgattctgtttcccttgctgacctatccttatttgttgcgggtcatagggttggaattgtatggggtgatcatatttgcccaagcgatcatcaactatgtctcgttggtgatcaatttcgggttcaatatgtccggggcgaggaacgtggcggtttataaggaggataaggcgctattatcgaggatcgtatcatctacgtatttgtgtaagttcatcctttggctcatttgccttgtcgtttatttatcggttataagcatcgtcccgtttttccgggatcattattgggtttatctcctctctttcctgttgacgttcaatgagcttctgttgcccatctggttcttccaggggatcgagaagatgaaatatatcacggtcgtgaacctgtcagcccgcctgttgttcgtggcggcgatcttcctttttgtccatgagcaagaggattatctgatcgttcccctgttaaacgggatcggggcgatgtttgcgggttgtctttctttgtatatcgtgttgaggaaagaaaggataaaattgtccgtgatacctgtgcgggaattgggatcggcttataaggagagtttcccgttgttcgtgtccggtctgtccacacagatttacgtgaatgtaaacaagttggtgatcgggtccttcttggggatgtctgaggtctccatctatgatatggcggataaggtattgcatctgatgaagctccccatctccatgatggcgcaaactgttttcccgaagatttcccgggaacgtaatatccgtttcgtgaaccggataatgctcttggtggtgggaaccgtgctgctggcttacgtctgtatgtttttcggtagcgaccggatcgtgtatcttttcactggggaatatatggaggaagcctctaccgtcatgcggttgctgggtatatctgctctcttggtctctttcaatttttttatgggaggaaaccgactggttcctttcggatattcatcggtctatatgaaggtgatggtagtaaattgcctgtttttcttgtccggcatcgggctgttgtggcttgcgggtaacatcaatctgtatacggtgacaatgatggcggtaacggtagaggttttttgtttcgtttccctactttttctgaataagaaattaggattattatatagcacaatatgaatatattaaaaaaactaggaatagttattatgggagctttgctgggagaaagtcatggagcagccaagaatttttcatatgtagacatgaatgaagtcgtaaataatataaaagtaattctatggcaggatgtgaatagttctaaggttttagatcaggctaaaaaatggaaaaaatctatcagggaaaatggtagttggattgatctggattatcaagataaatcaaggactccttggtctccacagcaacatttgaatcgtatattggagatgagtttcgcttatacaagtgagagaatggatacatttaaagatataggtttgggtagtgctatcatttccgccttaaattattggataagtgtatctccaatatgtacgaattggtggtttaatgatatttcagttcctcagacgataggtaagatattgattctcttagatgaaacagaatgtttgaatatggaattacgggatcagttaatcttgtgtatgaaaaagggtaatcttaaaaaacatgagggagccaataaaatggacattgctttacattatctgtttcgagccgctctgactggagatgataaattgatgaaagagaccgtaaaagaggctttcggtgtgctttcgaaaggaaaaagggaaggaatacaaatagatgactcctatcatcagcatggagatcaactgtacatatccggttacggtgatgtgttgatagatggtgtattatctattgcctgttacttgaaaggaacagactacggtttatcagaggaacagttaaatgttctgtcagatttcgtattgaacggatatggttctattttccgatcagtttataaggactataatgccgggggacggcttctttcacggaaaaatgcgttaagaaagagcgatattgtaaaaaaattggagttgttatcagagttggatgtacagaatgaacttaattaccaagagcttgcacgggaaatagaatcagtatctaatgttaaagatgaatataatcgattgttttggcgttctgattatatggtacaaaataatccatcctatcaagcgtccgtacggggagcgtccgtacggacttataaggccgagactggaggtaatggagagaacctaaaaggaactttattgtcggcaggatcattctctatacgtgtttcaggggatgagtattttaatattttcccctgttgggattggtcaaaaataccgggagtgacatcgttgaatcaagttccatcttatatcaaagaatggggtgagccgggtaaaaccgtttttgtgggtggagtttcagatggtaagatgggggctttcgctatggattatgcggaatatggtgtgagggctcgtaaaggctatttctttttcaaggatgagattatttgtctgggtgcgggtatagaaggaaatgatccaaatgtggagaccataacttccatcaatcaatgtctgtgcagaggtgatgtagtacaagatacaggatctgtatatcacgatcatatagcttattatagcctggattcttctagaatgattgtagaggctgatattcgtcaaggaagttggagagatattaatttaacccaatcgaaagactatatacggcagaaaatattttctctttacatagatcatggaaaggatacaaaagatgggaaatattcatatatgattgttccgggtttaacacaggatgaatttaggtctcatctaatcaatcatattgaggtcctaagaaatgactcttttatgcaagcggtagttaatacgaaaacacatgagttacaagttgtgttttatgaggctggagggtttgattatagggacttaaaattatatgtgaactcaccttgtgctgttttaattcctgattacaagttgcttaatgatttttatatcagtgatccttcgcaaaagagggatcaaatgctccttagccttaataagaaagaatataagatccggttgccaaaaggtagtttaagtggttcttctatatctgtacatatttgaacatggaaactctctcggtacgtataaataaggattccattagacggtatttatctaagctaagcataataatactttgtgttataatgctttattcgatgaagccttggtttttttggaatggtacaacggctatattatatgctttgattcttttgtttatctctgtaaggctcccttttatcaagaaaacattgaaaaggaaacaattcattctttgttgcttgtgcctacttatgtatagcagtgttgatttgttagatcttgttcatccggtttttattatacaatatttatttaggaatttgttgctggtcttctttgttattcttttttcgaatgatgaaaaaaggaatttagtgaggatttttactaaagtgtattcagttatactatttgtgagtattatagcttatatattttacttattggatataagtataccatatacaatcatgagatatgagtataatactgggtatcctagttttaaaaattatatatttttgataatacggaacgaaacagaattcttctctcgttttcagtctatttttttggaacccggacatgtggggatgatttcttctttattgttgtatgtaaatcaatataatttaaaaagaatatcagtatttattctttttatatcagtactgatttctttttccctagcagcttatgtactgcttatattaggtatgatattgtattatttactgaaaagcaagcattattttagaagagtttttcgtgtgtctttttttctttgctctgctgtggtgatctctgtcatattttatgtaaataatccggattctgtttattcaaaattagtcgtagctcggttggattatgatgaggaacgagggatctcaggaaataatcgcacgaacagccagtttgattattattatgataaagcttttttgcaaaagaatgatgcttttctcggaataggagatgaggaatttgttagaagatttggtagtggaaatagctcttataaaacatttatagttcagaatgggataataagtttgttttttttgtttgctttttattgcatgcttgtttattattgcttatctcctgtttatgttggattgctaattctttatgctgcgtcattcttgcaaagaccatatgctttgtgggaaattgagttgtttctttttatgagtgcaggatctatcttaaagtataaatataatgataaattattcgattattattccacataggaatatccctaagttattgcagcgttgtttggattatattccgtatagggatgatgttcagattattgtggtggatgataatagcgaccctcaagtggtggattttgataatttcccagggatgaatattcctaatgtagaagtgtattttacaaaagagggaaaaggggctggatatgctcgtaatgtaggaatagaacatgtaaaagggaaatgggtgttctttgcggatgcagatgattatttctctaaagcttttttatcaactatagatactttgaaagaatcaaagcatgacttgatatattttggttctagatgtgttgatgctattacaaaagaaatacatgaaagagaccgtaagtatacggaattgatgaaagaagcattagctggtaatgaagataaatataaatatactgcttatgttccatttgcgaaaatgattcgttctgatttgatacgaaataattcaattttatttgatgaaaccgtagtcgcaaatgatatgatgggatctattagaatggcatattgttctaaatctacaggatttgatgagagatgtatttatattagggaggctagggagggatctcttatgtcaaagcagagtatacaatatttagtatgtagatttaacgtatggttaagagttaatgattttttgacagatataggtttctcaaagtatcatataaatctaatacctatattattaaagatattatttagaggtaattttaatgtttttagagagagttgtaatttgctattacaagataagaaagttagtgtcaatgaccaagtgtctagtttatttatatatcgaattctgaaatttaaaaaatgatgaacattgcattattaaccgccggaggaactggtacacgcatgcatcaagatattccaaaacaatttttgcatgtccgtaataagcctatattaatttatactatggaggctttcgaacggcatcctagtatagacgcaattattgtagtggggttggaacgttggattgatattatttgggcgtatgccaagcagtttaatataactaagttaaaatgggttgtgcctggtggaaataccggtcatgaatctattcgtaatggattgctggaattaggaaaacattgtgatacatctgatgtcgtgatgatacatgatgggaatcggccgatgattagcccggatatcatatcagatagtttagccaagcagaaagagtttggaagtgcggttgcggtaattccttgtgtagaggtggttttcaagagcagtgatggtaagtcttctactataaacatacctagagatgaattacttcgtacgcaaactcctcatacgtatgagttaggaaaactgttgtgggcacatagggaaagtgagcgattaggcatttcaaatacggtagcttcttgtgatttgatgtgtcgattgggtgagatcgtgtatttctcgaaaggatctgaaaggaatttgaaaattacaacggtggaagatatagagatttttacctcattattagattataagaaagaggagggattgaagtgaatacggagacttttgcagataatttaagaaacaagaatattttgataaccggagcttcgggtttgatttgctcctcattcatagatctcttaatgcgctataatgagcaaggtacccatataagtatttatgcgatgagccggaacgagaagtatgcgcataaacgttttgaggcttattggggaaatcctttgttttcctttatttgtcataatgtgatagaacctttctccttggacattccttttgattatatggttcatggagcgagtaatgcctctccgaagcgttacgctaccgatccggtgggtaccatgaagtccaatcttggggggggatcgaatctattggagttggcaaaagagaaaaaagcaagacttttatatatatcctcgggagaggtgtatggggaaggggatggctcggattttactgaagactatagtggttatgtggattgtcttaatcctagagcttgctatccatctagtaaacgagcttccgagacgttatgtgtctcttacaaagagcaatatggggtagatgtagtaatcgctcgtccttgtcatatttatggttcagatatagagcgtgatgatcgggcctttgcacaatttctgcgaaaggcaaaggctggtgaggatatattattgaagagtgatggtagtcaagttcgttcttattgccatgtggatgattgcgcttctgctttattatatattttgctacgaggtataaatggcaaggcttacaatatcgcaaatagagactctgtattatctattaaagaactggcggagttaatagctcaaacagtgggtgtaaagattatgtatgatattccttccaattctgaatctaagggatattctaaagtgcaacgagctgtattggattcttcattattggaatctttaggctggagacctcaaatatcattgaaagaaggtttgagacgagttttaggaatatataaatgaaattgtggttatgttaagcatacaagattacgtaaaaaactcagagacacaagctagattaggcttaagaatgccaacgaaggaggaactaaagcaaattcaagatatattgctagatatgtataaagatatattgtatatctgtgagaaaaagcgattaacagtcttgctgggtggtggcagcgcattaggagcagtgcggcatggtggctttattccttgggatgatgatattgatttgattataccccgaaaagacatattcttgtttttaagtacattcaaaaaagactttggtgataaatatgatgtgacatctccgtcaaatggaggtgatgtacctgatatagtgcctcgtattcatcgtaagggaactttgcttgtcaacttgttcgataaaagaaatataggtccatccggtgtgtctatagatattactatcatggattttgtaccggataataaattaccccgtttttttcatggtgtagtttctaatattatgttttttctggctaattcaaaaggtatgtggttatgtcgtaatgaacgttctgatagtttttttagctccaatatcaagttgcatttattttataagtttcgattgtttgtaggtgcttctttattttttattagctatcgcaaaatgtgtttatggtttgataaatggacttctttgtgcagaatatctaattggctatctattcctgttggccgagaacattattttggagaactgttacataaagatgtgttttatcctccaaaggaaatgcttttcgagggagtgaaagcttatgttccaaatgacttaacaacctatttgaggaatttatatggagaagattatatgtcaattcctcctgtcgaaaaacgagaatcacatccttttgtccttttgaatttgtaattaaatgatatatgaatgcaaggatatcttacatcgatcaattaaaaggaatcgctatcttactagttgtgcttggacatgtcatagggtataacaattgtgagaatagtttcctatggcgctttatctattcattccacatgcctctttttatgttcattagtgggtatgtagcccaaataacatttcggatagagaattttggttggaatgaggtatcttctttcatgatcaaaaagtttaggacattgttgttacctatgataacttggggaatcgtgattcctttctttttcttaaggtcaactgctgagaacaaccttgttgattatctattaagctatattaaaatgtggggaggtggattatggttcttcgctactctcttttttctctcgattttattcttgttatatagattgattattaagttgataagtcccaaatctatcattatggattatgtgatcttatcattcttgtttgtacttattgtattgttgtataaatctttgcctaaagatgagatttattcggaaggtgtacgttctgtttttagttattttacgttttacttttcagggacaattgtatgcaaacaaaccaaattgaggaatcttgttctggataatgatttgtttttcgtgttttcatttgttatgttttgcctactgattccttcttttgtatatgatatgtcctcaatatttaaccaattgatgaagattgttttgtctttattcgcaatcccttctctgtcctttattgttcgccatgtttcttggaatagacaggtagataatatgttccaatattttggacgtgagtctttatctatttatgtgactcacaacggaccttttgcctttttattggtattatccaattatgttactttatcatcggttgataatatactttgttttttgtttctattgatattctcattattcatttgttatgcttctatatggataaagaacatagtttctatatctcctgttttagaattatttttatacggaaaatcttataaaagaaaatcgatatgaacatctatttcattaatccccctttcaaagctgagtatggaaaattctctcgtgagtcccgtagtccagcaattacgaaaagtggggctttatattatcctctatggctgatttatgcggctttgtattcaagcaaacagggacataatgtctcttttttggatgctccagctaaacagttaaatgaggaacagtctttaaacattattcggaagacggataatgagcattcattgtttgttttagatacaagtacgccttccattaaaagtgacgttgcttttgccgggaagctgaaggcattgtatcctcactcgtttgtcgtgcttgtggggactcatccttcggcttgcgcagaagagacgttgggttattcggatgcggtggatgcggtcgctattggagaatatgattgtatcatgaatgagctatcgaatgttctggacgcaggaaaggatctgcgggaggttcgagggctttgtttttgggacgggaaggagtttgtacgaaccgcgcctatgccaccgatgaagaatttggatgatcttccttttgcctcacaatttatcaaggaacatttaaatgagagggattactttttcgctgctgccacatatccctctatccagatatttaccgggcgtggatgtccctttcgttgtaatttctgtgtctatccgcaaacgatgcatgggcatgcttttcgggcacgatccgcagagaatgtggtggccgagttcgaatacattgccgctaatttcccagatgtgaaagaggtagtaatcgaagatgatacatttacagccaataagaagcgagtattggacatttgtcgtttgttagtggaaaagaaattgaataaacggctgaaatggttatgtaatgctcgtgtagaccttgatttggaaacgatgttggctatgaaaaaggccggatgtcgtttgattattccgggtatagagagtggtagccaacagatattggataacatcaagaaaggaacgaaggtggaatatttctatcagtatgttgccaacgctaaaaaggcgggtttgttaatacatgcttgttatatggtcggtaaccaaggcgaaacccgggaaaccatggaagagactcttcggttagcgttaaggttgaatacggataccgcccagtttttcccgttgataccttatcccggtacggaggcttatcagtgggcgagggaaaataactatatagagacggattatgagaagtattgtttgccggatggtacacataacaccgtattgtctttaccggatctttccgcaggggaaatggttgatttctgtaatagggcacggaagaaatattatttacgtgccagttacattttacacaggctgagagtcggtttgcgtaatccttcagacttgaaacgttcgcttaaggcattcgctaagttgaaacgttatttatttaaataatcatttgtatttaacgtgttgcctcttgtatccattataaccccgtgttataatgcggcttcttttatatcccaagcgattgagtccgtattggctcaatcgtttggggattgggagatgattattgtggatgattgttctagtgatgattcactctcaatcattcaaaagtatgcgagaatagattcccgtattcgatatttacggacggataaaccatccggttcgcctacgttaccccgtaatatgggaataaaggaagcgaaaggacggtatattgctttcttggatagcgatgatatatggttaccgaataagctaagcgatcagttaaaagtctttgagaaatctgaggtcgctattgttttctctaactatgagaaagtaagtctaggcggagagcgatgcgggcgtgaggtaatagctccttgtgaggttgattatcctttgttattgaaagggaattgtataggatgcttgacagccatgtatgattcagccttgacgggaaagatatttttcaaggaaattgggcatgaggattatgtatgttggctttctatcttaaagcaagggtataaagcgcagaacacaaatacggtgacggctctttaccgagttagtgaccattcggtctcttcgaataaattaaaagccatgcgttggcagtggaacattttgagaaatgagatggatttgccggtgtataaggctgtttattattttattcattatgcgattagagcttttgctaaggctatgaggtgatcttactcagtgaaatatttgtatgccttagatctagtgcttactcatagacaaactgtcttgtaaaatagagggcgatattctacttccagcttatggaaagtaaaatatcgccctctattagtgtagaaaaaattgagtatttcatagaatgaaaactataatcggagacttgttccggaaaaaagttctatctttgttcaacaacaggtgtggtaagaaaaaaggttatgacgactatgcgtaaattaccgataggaatacagagtttcgaaaatattcggaatgagaactatttatatgtggataagactgccttgatttaccaattggtgacgaaaggtaagccttactttctgagtcgtcctcgccgttttgggaaaagtttattgatatctacgttagaagcctatttccaagggaaaaaagaactgtttaaaggattggctatcgatcagctagagcaggattggaatgtttatccggtattgtatttcagtgatttgaaccaactcaatgatataagtttagactatgactatgcgaccctttgcgggattacccatgcggagttggtcgataatctaacaccggaattaggaatgcgaggggaaagattaggggtgtctttatgttaaatcccatccgtatgtgggcgagttttagtatatttgtgttgactttaaatgtaaatagattatatggaaaaacaaaaacaacaaccccagcggttgcaatcattggatgcccttaggggttttgacatgctctttattatgggcggtgcttctttatttgtcgctttggcgacattgtttccgaatcctttttttcaggcgatagccgggcagatggaacatgtggaatggaacggattggcgcatcacgacacgatcttcccattgttcctctttattgcgggtatctcgtttccgttctcactagagaagcaacgaggaaaaggtatgacggaaggggcgatttataagaagatcgtccgtcgggggattaccttggttttcttgggattggtatataacgggctattgtcgttcgaatttgaccacctgcgttgtgcgagcgtgctggcgcgtatcgggttgggatggatgttcgcagccttgttgtttgtccgtttcggttggaaagtgcgtgcggggataacggttcttattttggttggctattggctggcgatggcttttgtgcctgtgccggacgccggtggagcggggccattcacgctcgagggaaacttggtagggtatattgaccgcctgtttcttcccggacgtttgcacgagactgtttttgatccggagggtttattctccaccgtccctgcgattgccacggcaatgttgggtatgttcactggtgaatggattaagttacggaaagaggggctgaccgaccgaaataaagtgctttgtttagtaggagcgggagctgtattgttgatcgtcggcttgttatggagcttggtcttccctatcaataagaagctatggacaagctcttttgtctgtgtggtaggtgcttattccgtttggatgtttgctttgttcttctatatcatagatgtattggggtggcgtaaatggaccttgttttttaccgtgatcggcatgaactctattacgatctatttggcacagcgtttcatccgtttctcctatacttccgaggctatattcggagggttggcgaaattgatgcccgagaccgcccagcctttggttagcgctatcgcatatatcgctgtttgttggggattcttgtatttcttatatcgccaacgtattttcttgaaagtataatagacggatggagaagaagaaattaaatcggttggagtcattggacgtactccgtggcttcgaccttttttgcttagtggtgttggagatggtgttgcatccgctggcccatgcgattgatatgccttggtttaattcttttatgtggggattctcgcatgtggaatgggagggattttctacgtgggatctcgtgatgcccttattcttattcatggcgggagtttccatgcctttctctttgtctcgttataaggatatgcccgataagatggcggtatatcggcggatcgggaaacgggtgctactgctttgggtcttcggtatgatgtgccaaggtaatttattggctttggacccagaccgggtttatctgtattcaaatactttgcagtcgatcgctatggggtatttgattgcttccttgttattcttgtatgtaaggatacgggtacagatcggtatagcggcggctcttttattaatcttttggggagcgatggagtttattacggtcggtaactatgggggaggttcgtacacaccggatagtaatttggccgaatggatcgatcgcaccgtactgggacgtttccgggatagggcgacggtggagaacggggaggtgatattcgctacttggtatcgttatacatggatactgagcagcttgaatttcggggtaaccgtgttgaccgggttgttcgccggatatatcctaaagaacaaattatattccgagcggctcaaattacggatgttattcggtattggtctgggtatggttatcgccggatggctttggggtatcgagcttcccgttattaagaaactgtggaccagttcgatggtattggtgagcagtgggtactgtttcttgcttatggggttgttctattattggatcgactataaagggcatcgaaagtatacgacttggctgaaagtgtacggcatgaattcaatactggcttatatgcttactaacgtggtaagttttaggtgtatcggcgaatccttgtttttcggaacccagcaatatttaggaaattattatccggtgctcattgccatgtgcaatgtatcggtaatttatgtacttttgtatgcgttttataaacataatattttccttaaagtatagaaacaagaaaacttagatcgaagaaagatggaatcaatcaaacaaatataccggatgggtcatggcccttcaagtagtcatactatggggccgatgcgtgcggcacaaatgttcttggaacgtaaccggggcgctgttcgttttaacgtaaccttatatggtagtctggcggctacgggaaaaggccatatgacggacgcggctattcttgaggtattacagccggtcgcgaagacaaatattacttgggaacccaagactttcttgccgttccacccgaacgggatgttgttcgagtcgtataatgagagtggcgaggagctggatacgtggaccgtatatagtatcggcgggggaaccttggcgaacgagtctttcaatgagttgaggacggagcaagtatacgatatgcatacgatcaaggagatacaggcttggtgtgagaagactggccattcctattgggaatatgtcgagcagcacgaaggcccttctatctgggattatctggctgaggtatgggaagtgatgcaggatgcggttcgtcgtggtctggaagcggaaggcatcttgccgggaggtttgggcattcgtcgtaaggcttccgattatatgatccgtgcgaaaggttatggcagcagtatcaagagccggggaatggtgtatgcctatgccttggcggtgtctgaggagaatgcgtgcggtgggaagatcgtgaccgctccgacttgtggttcttgcggtgtaatgcctgcggtcctttatcacttgaaggagacgcgtgagttccgtgattcccgtatattgcgtgcgttggctacggcaggcttgtttggaaatgtggtgcgtacgaatgcctccgtatcgggggcagaggtaggttgccaaggtgaggttggcgtggcttgcgctatggctgccgctgccgccagtcagttgtttggtggtacgcccgcgcagatcgagtatgccgccgagatgggattggagcatcacttgggattgacttgcgatcctgtttgtggcttggtacaaatcccttgtatcgagcgaaacgcttttgctgctgcccgtgcacttgacgcgaatacgttctcgaacttctccgacggaaaacaccgggtaagttttgatcaggtggttgaggtgatgcgccagacaggtaatgatttgcccagtctttataaggagacctcggaaggtggtttggcgaagaacatggagaactcgaataattaaaagatactatttgatttactaataaataatctactattgatgataaacggaaagaaaagcctgttttacactgtattgatggccggtgccttgatgtcctgtggtggccctaaacaggctccaaatgaagaggtagcgaagagtggtaatcctgtgttcgagggttggtacgccgatccggagggaattatttacggggatacctattggatttacccgactacgagtgatttatatgagaagcaaaccttcttcgattgcttctcttccaaggatttggtgaattggaccaagcataccgccattcttgatacggcagaggtgaaatgggcgaagatcgctatgtgggctccttcggtaatcaacaaggatggcaagtattatcttttcttcggggcgaatgacgtgcatgagggagagatcggaggcatcggtgttgccgtgagcgatcgtccggaagggccttataaggatttgctgggtaagccgctgatcaacgagatcgtgaacggggcgcagccgatcgatcagtttgttttccacgacgctgacaatgatgagtattatatgtattacggtggttggaagcactgcaacatggtacgcttgaacaaagactttaccggacttataccgtttgaggacggaacgatttataaagaggtaactcccaaggattacgtggaaggcccgtttatgtttaagaagaatggtaaatattacttcatgtggagtgagggtggctggaccggaccggattacaaggtcgcttacgccatctccgattctccttttggcccgttcaatcgtatcggggaggtcttgcggcaaaatttcgatatcgccaacggagcggggcaccactcgatcatgcatgtgccgaattcggaagattactacatcgtgtaccatcgccggccggccggggtcaagacacgtgaccaccgggagacttgtatcgagaagatgacgttcaacgaggagggattgatcaatcccgtggagattacaaccgaaggagttgaggctcgcacgatccaataattacttccgatagaaatgaaaggcgggttcgaagggaatccgccttcctctcgaaaggaatcgtatttcctctcgaatgaaaaaaagaaggattacatagcaagaaaacttaggttttacttgctatgtaatttttttatactatttttgacgcatatgtcaaacaacaatgacaaacaatggtgacaaaacaaaaaataacattttattatggaagcgaaagatatgaatgagatggagcctcgcatcatagaagcggcgaagcgagtgtttgtccgaaaggggtacgaggcggctaccatgagtgacgtggcggcagaagtgggtattggcaggacggccttacattattattataggacgaaagagattctgttcgacgctattttcgggcaattgctttcttcattgttgccgaacatcgatcgggttttggatgagaagagtacgatgctggagaaaatgccggtgatcgttgatctgtatatgggaattgttcgtgcgaacccgatgttcccgaattttgtggtgggcgagttaaacagagatccggaacgtttattccagaccgtgctgagagacccgaaaaaaatacagcccatcttgcgtcttcgtcgtcagatagaggaggagatggacaaggggcttctacggaagatgccggtcatagatttagtttcgaccttggtgagcctagtggtcttcccgttgttgatccgcaagccactagcggcggcttttttggataacgatatggggcggtttgaggaatatatggataggcgcagggatttgatcgtcgaggtaataacccagctgatggtcccggatgccagatgatggatttgttcaatttaataaacatatcatagagtatatgagaggtgtatatgtattattgttaattagcctgtttgggtatgccgggagggttggcggacaggaatcggtcacgatcacgcaatgttacgaatgggcgagggcgaattatccacagattcatcaaatgggtttgatcgatcagacggagcgttatagcttgagtaatgtgggcaaggcttggcttccccagctctcggtaagcggtaaggcaagctatcagagcgacgtgacgaagttgcctttcgatggcgataagatttcctcgcttcttcccggctttgagatcccgagcttgagcaaggatcagtatcaagtcgtggcgcaggtagaccaaacgatctgggatggcggcagcgcacgttcggcccgtgctttgacccgtgccgaggcgaccgccaaccgggaacaactggagagtgagttgtacgcgctgaacgaccgggtgaaccagctgtatttcggttgcctgctgcaagatgagttgatacgccagaacgctttgctccaaaaggagttgcaggtcaatatcgagcgtatcgaggcgatgatggagaatggcgtggcgaatcaatcggatctggaaagtatggaagtggaactgctgaatgcccgccaaaatgagattgagctaaaagcgtctcgtacggtatatcggcagatgttggcgacctttatcaataaaccactgacggatcaagtcgtcttgaagactccggagtcacccgagcgttcattgtccacgcaaatcaaccgtccggaattacgggccttggatgctaagagcgaatggatcgagacgcaaaacaagcaggtaacggcgggcttgatgcctcgtatcggagctttcgtacaaggtggttacggtcggccgggcttgaacatgctggaggatagtttcgagccttattatgtggccggtgtccgtctttcttggaatctggggaagttgtacacgctgaagaacgaccggaggaagatcgaggtaagccgtcgccagattgatgtgcaacgggagaccttcttattcaatacccgcctgcaacttttgcggcaaaacacggagataaagaaaatgacggacctgatgcgtgccgatgacgatatcatccgtctgagaacaagcatcaagcaggcagcggaggtgaagctggagaatggcgtgatttccgtcacggacctgatccgggagatcaacgccgaggacatggcccggcaaaccgccgcggcgcaccgtgtacagcgcttgatgaccatttataattatatgtatacaacgaattaaatagagtatgacaaatacaattgatttatgagacatttgatttttatcagcttatgcagccttctatggacggcttgcggtaatacagacaatgattttgacgcttccggtacctttgaggcaaccgagatcttggtatcttcggaagccaacggaaagatcatggaactgaatatcgaggagggcgatcgcttggatgccggcgccatcgtgggttacgtggatagtacccagctttttctgcggaagatgcaactctctgccagccttcgctcagtagatattcgcaagccggatatccgcaagcagatcgccgttctggaacaacaaatcgccacggccaagaccgagcagcagcgacaagagaacttggtgtgcgccaaagcgggtaaccaaaagcaactggacgatatcgtgaataacatcaaatatctccagaaacaactggatgcccaatactcttccttaagcaagacgacgggaggtgccgacgccgaggcggagggcctgcaatatcagatcatgcaattggatgatcaactgatgaaaagccgtatcctcaatccccagaccggtacggtattggtgaaatacgccgagccgggagaggtgacggcggcaggcaaaccgctttacaagatcgccgatacggacttgctttatctccgcgcctatgtgacggcggatcagttatcccacctgaaactagggcaatctctcaaggtcttcgccgactatgggaatgatcgccgggaataccccggtacgatcacgtggatctccgataaatccgagtttaccccgaaaggtatccagacgaaggacgaacgggctaatttggtatatgccatcaagatcgccgtccgcaacgatggttatctgaagatcgggcaatatggggagattaaatatgaataatgagattcatataaatcatatcaccaagcgttatggcgatgtcgaggccctgcgggatctgtcgctggagatcggctctggtgagttgttcgggttaatcggtccggatggggcgggaaagaccaccctgttccgtatcctgaccacgttgttgctggccgatagcggtaccgcctctgtctgcggcttggacgtggtgaaagacttgaaggagatccgtcggcgggtaggatatatgcccggccgcttctcgctctaccaagacctgacagtagaggagaacttgaacttcttcgctacggtcttcaatacgacgatcgaggagaactacgatctggtacgggatatctataggcagatagagccgttcaagcatcggcgggcggggaagctgtccggtggtatgaagcagaagctggctttgagttgcgccttgatccatcgtccggatgtcttgttcttggatgagcctacgacgggggtcgatcctgtctcccgctctgagttctgggatatgctggatcgtctgaaacggcaaggcattacgatacttgtctctacgccttatatggatgaggcctcccgttgcgaccgtatcgctttggtgcgttctggggaatgcctatctatcgatacgccggtaggtatccgtacctcattcgataggcggctatacgcggtgcgatgcgcgtcgatgtataagttgttgggagacttgcgggagttcccggatacaaactcgtgtttcgcttttggagatgctcatcatcttacgttgaggagggatggggaggatgtcatgaggcgattacaggaatatctgaaaggcaaaggttacgcagatgtaagcatcgaacgccttgagccaagcgttgaggattgtttcatggccttgtaagagaggggatgtgtcgcatttccccaagattcgacctcgcgtcgggtgcgaagtcgaatcttggaaaaatacggggcttgcgtcaggcgcgaggtcgaatcgcggaaaaatgcgagggctcgcgtcgggcgcgaggtcgaatctcgggaaaatgcggggctcgcgtcgggcgcgaggtcgaatctcggggaaatgcgaggcctcgcattgggcgcgaggtcgaatcttggagaaatgcggcattgtaattatgaaataaggataaaaaatgaaagcgatagaagtaaaacaactgaccaaacgtttcggcaccttcaccgccgtcgatcatatcagtttcgaggtggagccgggcgagatattcggcttcctcggggcaaacggggcagggaagaccaccgccatgcgtatgctctgcggcctgtcggtcccgacatccggcgaggcccgggtagccggtttcgatgtctaccgggagagcgagtccatcaaacggaatatcggatacatgagccagaaattctccctatacggcgatctaaaggtatgggagaatatccgtctcttcggcggtatctacggcttgtctaaacggcagctgtcccagaaaacggatgagttgctggatatcctcgggctggaaaaggagcggaataccttggtcgattccctgcccttggggtggaaacagaagctatccttctccgtggcgatcatccatgatcccaagatcgttttcttggatgagcctaccggaggcgtcgatcccgtcacccgccgccagttctgggagttgatctatgaagcggctgcccgggggatcacgatcttcgtcaccacccattatatggatgaggcggagtattgtaaccgtgtctccatcatggtagacggaaagatcgaagcgttagacagtccctccgccttgaagcgggattttaagacaacgaatatgaaccaagtcttccacgccttggctcgaaaagcgacgagagggcaatgagcgttggataatgaataatgaataattaataatgaataatgaataatgatgatggaagatcataggcaggataaaggggggaatgtggtaggggataaatcctatcagtttgccttgcgtattataaaggcgtataagtatatagcctttactgagaaagaatatgttctctcgaaacagatgctaagaagtgggaccgctattggcgcattgatacgagaagcggattacgcgcaatcgaaagcagactttatcagtaagcaaagtatagccttgaaagaggcgaatgagacggcctactggatatccttattaaaggattccggctatatggatgaaagagcctataattccttgattgaggattgctatgaattaatcaagttactgacacgaataataaccacctcaaaatccaacaataagcgatgaccccattatccattattaattattcattattcattaacaaaagtgccttcggctcttttgttagaaaggagttctatcacattttcagggacgcacgcacgacaatgatcctcttgctcatgcccgtcatcttgatcatcttgttcggatatgccatcacgactgagatcaagcgtgtgccgatcgctattttcgaccaaagccgggatgagctgacactgaagatgacagaccgcttgaatgccagcgagtacttcgagctgcatacgaccgtcgatagctatgaggatgccgggaccttgtttcggcaaggaaaggtacacgtcatagttgtcttcccccccgggtacgcttccacggccgatgcccaagtacaagtcttggcggacgctaccgatccgaacgaggcgactcagctaatcgcttattgttcggcgatcatcgcggagcagttgaaaggcgagtcggcggttgagagtaaagccgtgaccccggttaccactttgctctacaaccctcaaatgaaaggcgcctacaacttcgtgcccggcgtaatgggtttgattttgatccttatatgcgccatgatgacctcgatcggcatcgtgaaagagaaggagatgggaacgatggaagtcctgctggtctccccgttgaaacccatctacatcattctggccaaggcgatcccatacctattgctgagtatggtgaatatcgctacgatcttgctgctatcctatttcctgctggacgttccgataaaaggcagcctgctgttgctggtttccgtgtccatcctgtacgcgatcgtatccctctgtctgggcctgctgatctccacggtagccgatacccagcaggcggctatgttgatcagcggtatcgccttgatgcttccgatcatgttgttgagcggcatgatgttcccgatagagaatatgccggatatcctgcgatggttctcccatatcgttccggccaaatggtatatcatcgccgtgaaggacgtgatgatcaaggggcttcccgccgtgtcgatcttgaaggagatcgggatactgtcgttcatggcggtcgtgctggtattcttgagtgtgaaacgttttaaaatacgattataagctatgttacgatatttgttagagaaagagttcaagcagatccgtcgggaccggttcatgccgaagattatcttcatcatcccgatcatgcagttgatcatcttgcctttcgccgctaatttcgagatgcgaaatattaaccttagcatcgtggacaatgatcattccgtcacctccatgcaattggtagataaggtactatcctccggatatttccgcctgacagaccggtcggatcgttacgacgaggcgctgacctcggtggagagcaatgagtccgatatcattctggaaatcccctctgatttcgagcgggacttggggaaggagggcagggcggacgtgatgatcgccgctaacgccgtgaacggaaccaagggcggcttgggtagctcctacctctcctcgattatacaggatttcaatagggagaaaggtttcgcctctatgggatcgggcaggggagtggcttcgattaacctgttcaatccccacttgagctacaagatctatatggttcccggcatcatggtattcttgctgacgattatcgggggatcgatctccgccttgaatatcgtgagcgagaaggagaaagggacgatcgagcagataaacgtctcgcccgtgcccaagtccctgttcctgctgtcgaagctgatccctttctgggtgataggctttgtcctgctgacggtggcgatcctcatcgcttggctgatctacggcttggtgccggaggggagtttcggggtgatctatttgttcgccgccgtatatttgatcgcttttacgggatttggcttggcgatctcctccttctcgtccacgcagcaacaagcgatgcttacggcgtttttcttcttgatcattttcgccttgctaagcggattgttcacgccgatcagcagtatgccggaatgggcgcagaagatcacgctggcgaacccggtgcgttatttcgtggaggtgatgcgtatggtctatttaaaggggagcggctttgccgatttacggggacattttgtgattgtctgtctatttgctgttttttttaatctgttagcggtaattagttatcgtaaaaaggggtagttcggaaataaatgttttctttgtatcccgtttacggattataaactaatacagcgaaaaaacatgtcatttatcattgtcgtactttgtttggccttattgattgtcttgatatcctactttaaggtggatgctttcatcgcgtttctgatctcctctatcttggcgggcatcgctttgggcattccgttggagaagctgccggactcggtgaataacggtatcgggagtatcttgggtgggttgacgttgattatcgtattaggcgctatgctaggcaagttggtggccgagagcggagcggcacagaagatcgcttccgtgatggtgtcgctttttggtactaagcatatacaatgggggctgatggtgacaggctttgtcgtgggtattccgttattttatgggatcggatttgtgttgttggtgccattgatcttctcgatcgtgtataaatacaagcttccggcggtctatatcgggttgccgatgttggcggcgttgtccgtgacgcatggattcctgcccccgcatccgtctccggtagccttggtggtacagttcaacgcaaatatcggccttacgctgatctatggcttgttcttggcgattccagctatcattatcgccgggccggtgttcggcagtcggttgaaacatataaaatccggtccggtcacgttgttcgagcagaaagaggatagcgggagatatagcatgccgggcaaggcgaatagttttatcagcgctacgttgcctgtctttttactgattatcgtgacggttattccttattgctttaaggatatgggcgagatggcgagcgggatagtctcttttattggtgctccttccattgtaatgctgatcgccttgttgttcgctacatatacgctgggcatccggcagggacgtagtatcaagtcggttatggcagtctatggggaggccgtgaaagatatctctatgatccttttgatcatcgcgggttccggtatcttcaagcagatcatggaggatagcggggtaagcaatgagctggcgacaagcctagagcaattgcccgttcatccgttgatcttgggttggttgatctctgccgtgatccgtttgtgcgtgggatcggctacggtggcggcgttgacggcggcgggcgtggtgatgcctttagttacgcaaacgggtgcgaacccgaacttgatggttttatctttaggagcgggtagcttgatgttctcgcatgtcaacgattccggtttctggatgttcaaggaatattttaacctaagcataaaggatacgatctgctcatggtctatcatggagacgatcgtgtcggtcgtaggattgatcggggtaatgatcttaaatatgattgtataataaaagaatgattgagcaatgagaaagagatggctgcttagtatcgttattatgcttttccctttcgtcgcctcgtttgcggcggacccggaggaaggtacttatccaacggtcgggaggctttttcatatagcacgaagcgtgaataagaacttggtttgttacgatgtgaatctgagggatggtaagctggatacacatgatcccttgaacgtttattgggtcaatcgggaaaagcatccgggggaaaccaatggcttgagctatatccaacggaaaatggcttatgggtataaactgatctcggcgagtgataatgcttgtgtatgctcattgaccgcttatccctcccgccagttgacgattaccaaacgtgattcccgctatgtatgctacataacgatcaacaaccaacaggcgattctccaatccctctacgttaaagccagctccaagaatcctttaagcgtcgagtatgtagagctacaaggaatctctgtcgccacgaatcaaccggtaacggaaagagtcaggaaatagatcaatatatttttttactaacatataaatgaaagaaattatgagcatgattaacgcagatgagaattttgagaaattagggttgaccttacctcccgcaccggctccggccggagtttacaagccttgtgtgatagatggcaaatacctgtatctttccggtcacgggcctgtgcggaatgataagtccttgatcatcggacgtatcggcaaggacttgacgatggatgaaggcaaactcgccgcccagcaagtaggacttaccatgttggcgaccatccaggcgaaccttggtagcttcaacaagataaagagagtgatcaaggtattgggtatggtaaattgtacgcccgatttcggaaagcatccttatgtgatcaatggctgtagcgagttgttcgccgccgtatgggggccggataacggtgtaggtacccgtagcgccgtaggattcggttctcttcccgataatattcctgtagagatagaggctttgttcgaattatacgaataagccatggacgattggtacgtcataagtaatgtagaccggatagactcgccagccttggcgttctatccggatcgtatttccggcaatatcgagttggccaagaggatcataggcgatacgaaccggcttcgtccgcacgtgaagacgaataaggcggctgaggtatcccgcatgctgctggatgccggaatccggaagttcaagtgcgctacgattgccgaggccgagatgctggggcatatgaatgccccagatgtattattagcctatcagccggtaggtccgaagatttcccgcttattagatttgataaaggcatatcccgccacccattactcctgcttggtagatcaagcggagaatgcccgtgcgatctcggctctttgcgaggccgggaatatcaccttggatgtctttatcgatctgaacgtgggaatgaatcgtaccggagtcctcccggagagagcggaggcgctggtggatgccattctgccgctgaagtctctgcagattatcgggttgcatggctacgacggacatatacatgacgcggagctatcggtacgttgccaaggcgcggatgcagcgtacgccttgaccgaacgtgtgttccgggagatatcccgcaagtttgcctatccattggtaaaggtgatgggaggtactcctacattcccgatgtacgcgaagcggaaggattgcgaatgcagtcccggcacgtttgtgttctgggattgggggtatggaaacgcttatccggatatgccgttcaaggtagctgccttattgataactcgggtcatttccgtgctggatgagcatcatgtttgcgtagatcttggttacaaggcggtagcctcggaaagtcctttgccccgtgtgtttttcttgaaccatccggaggcgaaacctatctcccagagcgaggagcatctggtcttggaagtcccggacagtcggctctatccattaggttccgtattctatggcattcccgttcatatttgtcctacggtcgctttatacgacaaggcttatgtgatccgggatcgtgaggcgatcggcgaatggcctatcattgcccgttcacgtcgcatcacctattaacggtaatcaaattttcaattatcaattatcaactctcaattaataaaatgaataagccatttattatcgacgctcatctcgaccttagcatgaacgctttggagtggaaccgggatttgcgtcaacccctaaaggaaataaaccggagagaaatcggtatgaccgataagcccgaccgtggaaacgccactatatcgtttgaggaactgcgtaaaggaaacgtcgggttggtagtcgccacccagatcggtcgctatgtagggccggataatccacttcccggttggcattccccggaacaagcttgggcgcagacccaaggccaacttgcttggtataaggcgatggaagaggagggccagatggtcatgatccgggataagaaggccttggatacgcatctggctctttggaaagacggtgaacccgccgacaagaagccgatcggttatgtattaagtatcgagggagccgactcgttcatcacggtgaatcatgtggaaagggcgtatgcttatggcttgagggcggttggcccggcacattacggccccggaagatatgccaacggtacggattctaccggtcatctgaatgccatggggaaagagttgttgcgtaccatggatcgcttgggtatgattcttgacgtgacccatttatgtgatgaggctttctgggatgcattggatttgtataagggaccgatttgggcgagccataacaactgtcgggccttcgtagatcacaaccgccagtttagcgacgagatgatcaaggcgttgatagagcgtggcgccgtgatcggtatcgccctagacgcttggatgatggtaccgaactgggtgcgaggcgagtctactccaagaggcatgaactgtggtatggagattatggcgaacaatatcgatcatgtctgccaattggccggaaacgcgaaccatgtggctatcggcagtgatctggatggtgctttcggtacggagcaatgcccgtatgacctagtaacgatcgccgatctccaaaagatattcccgatccttcaataccgtggctttacggacgatgctatcaaccgtatcgcctctggtaactggattgagttcttacggaagcatttgccggaataagctaccgcaacccgggttgcagtgataccgcgatgtggatgcagtgttactgcaacccggattgtagcgtcactgcatccgcatcgcggtaaaaagacaaacaaagtgagtctattttatatctgcaataccaagacgaaccggcatcccttcttatattccttatcgatagatagggttccgtttaatttactagccatcagtgcgcagatgggtaatcccaaaccatcgccttgtgctagatccttcgcctcattgaatggcttgaataagttctcttttagatcatctggtatgcctgtaccattatcggtaatgataaattggcaaacatgagcgcctttccgtttaaattccagacgaatgttaccgctggaagtatataatgcggcattctttaacaaatgcaataagacttgttccagatgctcggcgttcgtcttaatctccaattggggcacgtctgttacgaggttgacctccggctgaatatcccctttaaccttctccacgattttcttactgaagtttcctacattaaaagaactaacctcatacggttccatcaacgtattctccaaggaggaaagctcttggatatgaaccgtaaactgtttcaaagcctctacccgtgtccatacatcctcggcctgcttcggagctaccgcctgtaattccttggcggatgcgctaagcttgttcaaggtaggctccatctgaaccgatatgttttggatgaattgggcttgttgttcgctatgctcgtttgtcgtctggatgattttctttaatttcttgttcagcacgatgaagcgcagcaaaaggaatcctaagaaaagtaaggcggctataaggattaccacgaatgtaataagtccaacaatcatatattgcttaacagacaatttatcgtctttctcctgtattgtctgtaggctctgatcgtatttttgttgtaatgcccctagcttatcctctgccgtaagagcctttacggaatccgtccatacgatgtatttgtcgtaggtacgttccatcagtggggcgttgtttgccttacgagcgatagagatcaggttccggtagcaatcgttcaccttgtcgtattcttttttctccttatactggttgatcagtttctggaaagcagcgtccccctgctcgttttgcccgaacgtataataataacccgcttgggtatataataaattgttcgataacttctcatcacccgcttggctggccagattatctaatgtattgagttgaacttgcgcttgggcggcgttctttagcttaatatacatttccaaccgctctttcgttacttggaagcgttgctcatagagcgatttttgcaacttcagttcctcggttaagatgaattggttcatctggcggcaaagatcgaatgcctcttggtaataattctcgcaataatatagataagccgcctgcgtaccggcatcgattgcctgtttgtaatcaccttgttgggataagctcttgtaagcttgtaaaaaaagataacgagctttggtgtagtcttttttttccaggctgctttgtgcctgtttcataaattgattcgtcgtattttgcgcctgcatgaccggacagaaacaaagcataaaagatagtaaaagataaatgaccctcataacttaaattttttttgaagtaaaaatatgtatttactgggattcatacaaaatatatcaggggaaaaataatagatattttattttaagatacgatttgtgtgtcaatattcatatttattttgtcaattctgaaagttctgaacaagtggaatgtgctatctttatcacatttattaactttaagaattgtgtttatgagtatatccgtattaacaaaaggcatgtcgtgtctattcttttgtttttgtgtttgttgtatgaatgcgcaagtaagaaacactgatcctgtacgtcacttgaggatatccggttatttggggcaacggatcgacgcttgtatcgagtatcgagtgaaagctcaagatgtggatcatttggtggaacctttccggcataaggaagagaccttgcgctggcaatcggaattttggggaaaatggatacaaggggcgatcgcctcataccgttatgataaagatcctgagttgtacaagattattaagaatggagcggagtcgttgatggaaacccaattaccgaatgggtatatcggtaattattccgaggaagcgcagttgaaccagtgggatatatgggggcggaaatacacggctttaggtttgatcgcttattatgacttatccggggatcgaaaagctttggatgccgcctgccgggtgatcgaccatttgatgacgcaggtgggacccggaaaagtgaatatcgtgacgaccggtaattatataggaatgccaagctcttcggtacttgagccggtgatgtatctgtataatcgtacccggcaagataaatatctggattttgccaagtacatcgtaaagcaatgggagactccggaaggccctcgattgattagtaaggcgattgcggatattcctgtcgccggacgttttccacatccaaaggtttggttctctccggagaatggacaaaaagcatatgagatgatgtcttgttatgagggcttgttggaactttacaaggtcactaagaatccattatatttatctgtggtggagaaaacgatgaatcatattatcaatgaggaaatcaatgtggctggttccggtagtgcgttcgagtgctggtatgggggcaaggcgttacaaacttatcctacttatcatacgatggagacttgtgtgacgttcacgtggatgcagatttgtgacaggatgctcggactaaccggaaattccttatatgcggaccagatcgagaaggctatgtataacgctttactagcctcgctgaaagcggatgcctctcaaatagcgaaatacagtccgttggagggctggcggcatgaaggagaggagcaatgcggtatgcatatcaattgttgcaatgcgaatggacctcgtgctttcgcgatgattccgcaattcgcttatcagataaacggcagacgtatcgatgtcaacctatatgcggcttcgagcgtggaggtagagttggataaaaagacgagggtgtcgatgacacaggagacgaactacccgatagacgggcaagtccggattgtggtggaaccggagaagacgagtgattttacgatcgccttgcgtatcccggcgtggagtgagcgaactgtggtgtctgtcaatggtgagcctttaacggatctgttggctggagcatacctaccgattcataggacttgggagaaaggggatgaaattacggtggagttggatatgcgggctcgcttggtggagctgaacgaggctcaagcgatcgtaagaggccctttggtgctggctagagatagccgctttaaggatggagatgtggatgaggcttccgtgatcgtcagcaaggatggttatgtggaattaactccggtacaagcccccgatttcgcttggatggcttttaccgttcctatggttttaggaacggatttggaaggaaacggcaaggctcgcccgattcatctgtgcgatttcgcatcagctggtaatacgtggaatcaggcagaacgttatagagtgtggctaccaaaaacatggaatgtcatgcgtacgccttataaaccttattgagcggttcactccagctcaatgcgtccgatccctgaattccgagggtgtaaccccttctttcttcttaaagaatgtggagaactggccggcattctcgaaatgcaggctataggcgatctcggagatcgtcaaaggggtgctagtcagaagctctttcgcacgaaggagcttctgttgtaattgatattgggcgggggagacgccggtgtattccttaaacatccggcgaaaccatgaataacctaaaccaagacgggcagcgatctcttccggacttaatgggtcctcgatgttctccttcattaatatacgtgcctcgttgattttatctacgacataggtgttcgtgaaggagttgttcttttccttataatatacggagcctaatatatgaagcacgatactggagatcatctgttggtaaccggatttctcctccgaggcgaacttcagtatatcctcataaagtccgacgatcgtagcgctcagcccgatccggtgtagcggctcttccttggtaaagaatttcttctccacacgtttatcgatatgaataccccgaaaacctacccaatactcatcccatcccgtttcccggtccggataataactatgccattccccggggaaaaggaggatcatcgtccctgcgtttatcttttgcgatttacaagactgggaggaaaagtacccgctacctttcgttatatataccaattgatactcattcaggatgcgcccggtctgaggcttgaaattatacttctccggatgccgggaaagtggataggcgcaacccggcgggatgaattgatatccgaccgtcgtgacgacgattccccattcctcatccgtagcgctgatcgtcaagtaacgtagtaaatcattccgcagttcgttcatgtcagatttgaaaggtttaaaatcattttcgtaagcaaatatagcaataatgcttctacttttgctttcgtcaaacaaataactttgttaagccatgaaggaatataattttctagcctttgatataggggctaccagtggacgggccgtgctcgggaccttaaaggatgccaaatttgaaatgaaagagatccatcggttcccgaatccgatggtggaattacacggacggttttattgggatatctatcatctttatacttctcttatagaaagcttgacgatatgcgcccggcaaagaatccggttgcactcgatcggaatagatacatggggggtggattttgggtatgtggctttggatggctctttattgggcttacctcgtgcttaccgagatccttatacggacggcgctcccgaggactttttcaaacggattcccaaggaagaggtctataagcggacaggtattcaagtgatgccgtttaatagcttgttccagcttttcagggcggggcaagactcgtttataccgcaggaagtggcggaaaagatattattcataccggaccttttggcttatatgttgacggagcgtatggtatgtgaatatacgatcgcttccacgtctcaattattgaacccggaaacccataaattcgattacaagctcttggaggccgtaggtgtatctcctactttgatgtgtccggtggtgatgccggggacgttgatcgggcggttgagcgagtcgatcgcccgtaagacaggaatcggggaaatcccggtaatcgccgtggctggtcacgatacggcgtcggcggtagccgctgttcctgcttcttctcctaatttcgcttacttgagtagtggtacttggagcttgatgggtatcgaggtggagaagccgatcatcaacgaggtatctttcaagaataatttcacgaatgaggggggtatcgagggtacgactcgctttttgaagaatattacaggtatgtggatcttggaacgttgccgggagcaatggaagcggtccggattggattattcgtacgatgatatggttcggatggcggagttgagcgaatttacttctttgatcaatccggatgatcctcgtttcgccaatcctgagagtatgctacgtgagatcacggcctattgtgaggaaaccggacaggctgttcccgcttcggacgccgattatgtacattgtatattttatagcttggcgaatcgttataaagaggtgctggaaatactcaaatcgatgtcgccacatccgattgaacgattgcatgtgataggtggtggctctcggaacgatctgctgaatcagttgacagccaacgctatcggtattcccgtattggcaggcccgtctgaggcgactgccattggaaattgcttgatacaggctaagtcggcaggattactgacggattgttgggagatgcgaagactgatagccaccgcattccctcccaaggaattttatccggaaaggtgatacactttcaaatcatataaatttaaaaacatcataccatgacaaaagacagtttaattcaacaggcatttgaagtagcggcagaacgctatgcggccgtaggtgtagacgttcgtaaagctttagaggatatgaagaaaatatccctatccctgcattgctggcaggccgatgacgtaagcggtttcgagaaccaaggcggctccttgactggtggtatacaagtgaccggcaattatccgggacgtgcccgtactatcgacgagttgcgccgggatgtattgaaggcgaaatcctatatccccggtaatcatcggcttagtctgcatgagatctacggggatttccaaggggagaaagtagaccgtgacgaggtagaaccccgtcatttcgagagctggatacaatgggcgaaagagaatgatttcaagctagacttcaacagtacctctttctcgcaccctaaaagcggagatttgaccttggcgaaccccagcgaggatatccgtaacttctggatcgagcatacgaagcgttgtcgctggatcagcgatgagatgggcaaagcccagaacgatccttgcatgatgaacctttggatacatgacgggagcaaggaagtaccggccagccgcttacgttatcgccgtatcttggaggaatcgctggatgagatattcgctaccgaatataaatggatgaaagattgtatcgaggcgaaactcttcggtatcggtctggaaagttatacggtaggttcctatgatttctatttgggttacggggcgaaaaagaacaagatcgttaccttggacaccggccatttccatttgacggaaagtatcgccgacaaggtttcctcgttattgctgtttacgcccgagatcatgttgcacgtaagtcgtccgatccgttgggatagcgatcatgtcgtgatcttgaatgacgatgtgcaggatttagcccgtgagatcgtgcgttgcgacgccttggaccgggtacatatcggtttggattatttcgacgctaccatcaatcgtatcggtgcttatgtcattggtagccgtgctacgcaaaaagcctttatgctcgctttgctggagccgatcgccttgcttcgccagtacgaggatgagggtaagtatttccagcgtcttgccttgcaggaggaagcgaagagtctgccttggggggcggtttgggatatgtattgtctacaaagtggggtccccgtaggagagtcttatatcgctgagatcgagaaatatgagtccgacgttacctcaagacggcaatgatagagatcgggatcgggttgttgatcatcgcgatcggcagtttcgggcagagtagctcgtacgtgccgatcaataagatccgggattggagttgggaaagcttttggttggtgcaaggtatcttcgcttggttggttttcccttatctcggggcgatgttggcggtaccggaagggagtaccttgctggagctatggtgttcgccgggtagcttgggagcggttatctatggcatgctctggggtgtcggcgggttgactttcgggttgagtatgcgttatctgggcgtagctttgggacagagcatcgccttgggtacatgcgccggttttggtacgctcttcccggctttgttcggtggaacgaatctgtttgagggaaccggattgatcctgttgaccggtgtttgcattaccttagcgggtatcgccgtgatcggttacgccggaagcctgcgggcccggaatatgagtgaggaggagaagaaagcggcggtgaaggattttgccttgactaagggcttggcggtagccttgcttgccggtgtgatgagcgcctgcttcaatttgggtttggaatcgggaaacgaggtgctggcgaaagcgagagaggcgggagctagcgatctgttcgccttgaatcccgtgatactgttggttactttgggcggcttttgtacgaacgctgtgtattgtattttccagaacgtgaaaaatgggacgggcaaggattatttctcggtatcgggaggtacattgctgaataatgtcttattttgcgctttggcaggcgtgctttggtactcgcagttcttcgggctggggatgggaaagagctatttctcggattccccggttatgctggctttctcgtggagtatcctgatgtcgctgaatgttattttcagtaatgtctggggcatcttattaaaagaatggaagggcgtggatcgccggacgatcgtggtattgattaccggcatgtgtatcttgatcctttccttattatatccgaatatagtttaattaaaatagacatgataacactaagaaacaatgaacgcctaatggcggaaatagatcgtatcgccgaggtcgccggttatttgtggaccaagggttgggctgagcgaaacggcgggaatatatcggtgaacctgactactttattgagcgaggaggagaaggcgttgccggctttggtttcctcgatccccttacaagaagcgatgacggccttatgtgggcacgtcttttatgtgacgggtaccgggaaacggatgcgttacgtggcgaaagatcctttcgccaacggttccttgatccgtatcgccgccgatgggaaatcgtatgatatcatagcggagcaaccgatccaaccgacttccgaattgccttcccatttgttgatgcacaatttcttgcgtgcgaagggacgggataaccgggtggtattgcatacgcatccgacggatattatcggcatgacgcattgcaagccgttcttggattcggagaagattacccgcacgttatggagtatgatcccggaatgtcggattatcgtgccgaaaggggtcggtatcgttccttacgagataccgggcactttggcgttggcgcacgctacgatccgtcagttggaggagcacgacgtggtgttctgggagaagcacggtatccttgccgtcggtgaggacctgatcgagtgcttcgatgcgattgatacgttgagtaaatccgcccagatctatttcagtgcccgcatgaccggttacgagccggaaggtatgacggatcagcaattggatgacttggttccggcttttggactctagcgtatgcgaaagaaattaatcattctattcatagggatcggttcgttcacgttgttcgcccagcagcgagaccatcggacacgggagtatatcgctccggtccgtattgtctggcagcaaaatagttcgcgaattacgggagcgaactatttgcttgttccgggcaacggacagtcggatttggcgaataatcggttgtgtgtgttgaaaagtacgccaaccgaacatcctgctttgctgcttgatttcgggaaggagttgcaaggcggtcttcagttggtgaccggcatgccatcgtctcacgatccggtttccgtgcgggttcgtttcggcgagtccgttagtgaggctatgtgcgagatagatggtgcgaacggggcgagcaacgatcatgcgatgcgggatttcgtggtatcgctcccttggctgggcgtgcaggagatcggtaattccggtttccgtttcgtgcgtattgatgtattgggtgattctacggagttgcaattaaaagaggtccgtgcgatctccacgtttcgggatattccttatctgggctctttccgttgtaatgacgagcggttgaaccggatctggaagacaggtgcgtacacggttcacttgaatatgcaggaatatctatgggacggcgtaaaacgggatcgtctggtctgggtgggggatttacatccggaggtaatgacggtcagtaccgtcttcggttataatgaggtggtttctaagagcttggatttgattcgggatattacgccgctgcctagttggatgaacggtatcagttcgtactcgatctggtggttgttgattcagcgggattggtattattaccaagggaatcttgcgtatctacaagagcaacgctcttatatgactgctttgttgcgtcacttgatatcgaaggttgacccaagtggacaagagagactggatggaaaccgtttcttggattggccttccagtgagaatacacccgctatcgatgccggccttcaatcgctgatgatacaagccatgcgtgcgggagaggagttatgtaccgttttaggtgaggatgcgttggcctcggaatgccgtatggtagcttccaaggctattaagttttcccttcggaagaaattccggttcccttcggagaaagatcggattacgcccggggacaaacaggccgccgctttgatggctctggcgggtatcatggatgctaaggaggcgaacgagcgttgcttggcggtggacggggcgaaaggcttctctacgttttacgggtattatatgctacgggcgatggcgttggctggtaattaccaaggtgcgttagatgtgatccgtacgtattggggagctatgctggatgtaggtgctactacgttttgggaggatttcaatatggaatggcttccggatgcagggcgtattgatgagctggtccccgcgggaaagaaagatattcatggagattatggggcgtattgctatcaaggtttccgccatagcttgtgccatggatgggcttcgggtcccacatcgtggttaagcgagtacgtattgggcgtacaagtggtggaaccgggttgccgtacggtacgtatcatcccacatctgggagatctcgaatgggtggaaggtacgtttcccacgccttatggggtgattgagatccggcatgagaaaggtgcggacggtaaggtgataagccatatcaacgctcctgaagaaatccgtgtttgtatggattaaaaccaaatatgaataataaaataaacgatgctactatgcgaataaaacagtctatttatatctacgctttcgccgccctcttattaggcggttgcaaaagcaataatgaattaacgatacctacgaatctccgtacggaataccttacggagcctatcggcttggatacttcgtctcctcgctttacatgggaatactccggaaatgaggagggctttaaggcttcccgctatgaggtacggatcggtacgagtccggacgacttgcggccctatgcggagggaatggccctgaaacctcatacccgttattactggaatgttacggtatgggatggtgaagggcgtccgtgcgctacctcggagacggcttctttcgagaccgctaagttcgatccctcggattggtccgcctcttggattaccgatcataaggataaggagttcgagcctgcccctctgttccgcaagtctttcccggtaggcaaggaagtgaaggatgcccgtgtgtacgtagcatccgccgggtatcatgagctattcatcaatggcgagcgggtcggaacgaattatctggacccggggtatacgcatttcgataaacgtattttgtacgtgacgcatgatgttacctctttgctgaagcaaggcgacaacgccgtggccgctgttctgggaaacggctggtacaatgagcagtccgtggcggtctggaattttcatgaggcacgctggcgggatcgtccccgcctgctatgtgagttacgtattacctatacggatggtacgacggaggtgattggctcggacgagacttggaagacttccaccggggcctatacctataataatatatacagcggcgataaattcgatgcccggctggaagaggccggatggaaaaccgctcatttcgacgatagtaaatgggaagcggcacttccggcgcaggctccggcacctctgttggtagcccagcaaatgccgggaatccgtatcacggaagaggtgagacccgtgtctatgaaacgtttctccgatcaattatacgtatattctttcccgaagaacatgtccggcctttgccgcttgaaggtgaaaggcgaggcgggaacccgtatcacgttaaaacatggtgagttgttgaagaaagatggtcgcttggagcaaggcaatatcaatgtatattatcatccggtcaagccggacgaggtattccagatggatgtctttaccttgaaaggtacgggagaggaggagatcttcatgccttccttctcttatcacggtttccaatatgtggaggtggagagcagccgccccgttactttaacggaagagaacttgaccggcttgtttatgcataccgatgtccgtccgtccggttccttcgcttgttcgaatcctctattgaataagatttgggaggctacgatgcaggcttaccgcagtaacctgcacagtatcccgaccgattgcccgcaacgggagaagaatggctggacagccgacgcgcatattgcgatcgacctcggtttgctgggcttcgatggtatcacgctttatgagaaatggatgaatgatattatcgataaccagcgtgaggcgggtgagatttccggtatcattccttccagcggttggggatatggcgagtggccgggtccggtttgggacgctgtcatgtttatcatcccgaacgccttgtatgattattatggcgagtctcgtagtatagagcgcttatatcctacgatgttgcggtatctggattatttgaagacgaaagagaaagacggttacttgccttttggcttgggtgactgggtgtattggaaagctacgacgaataatgaatatacctctaccgcctactattatctggattataagttgatggctcgcttcgcctctttgctgggcaaggatgccactccttatcaagagaaagcgaatacgctcaaatccttgatcaaccagaagttcttcaacgccgagaccggtgtgtatgccgaagggacccaaacggcgcaagccttggccttgtatctgggacttgtaccggaaggaaaggaacaactcgtggcggataagctgcgtgaggtggtagcgggaaataactatttcttggacttcggtcttttaggcagtaagaccgttccggccatgcttacgaaatatggctatatcgaggatgtcatgaagatgatcacgaagactgaggcaccttcttggggatattgggtagagacgatgggttactccacattgccggagacgtggacacttagtccgaagtttgccgacgcttccttgaaccatgtctttatgggagatgtctccgcttggatgatgaaccagctggccggtatcaatcatgacgactcggatccgggcttccgtcatatccgtatcactcctcatttcgtgaaagaactggattgggcgaaaggtgagtaccattccgtacgcggccgtatcgcaagcgaatggaaacgggaaggggataaggttatgcttaccgtgacgattccggctgattgctccgccgatatcgtggtaggcgatcagaccgagaccgtatccgccggtacgcatacatttacatatcccgcttaatatacttagttgtagagacggggcgtgccccgtctcccaccggctaatagtatctttaagttaccttttggggagatgagacggggcacgccccgtctctacaaccagataattataaactgttgaactttaaagattaaatttatgaataagctactcattgccttctttttgttcctcttgcctttcggctggataaaggcgacagcttcatctcatcccgaatccttcccttggaaagcccaatggatcaataccgagcgttgccaaagcgccacgaacacttggttgatctaccgtaaatcattcggcgtgacggatgtcccggaccaactcatcgcccgtatcgccgccgattccaagtattggctttggatcaacgaccaactggttatcttcgagggtggcttgaaaagaggaccttctccttccgggacttattacgatccggtagatatcgccccttacctgacaaagggctcgaacaccatcgctatcttgctctggcatttcggaaaagacggtttcagtcatatcaacagtgggaaagcagctttgttattcgaggcgatcgctccgggactggagatcgtctccgacgcgagctggcagtgcgccttgtatgaggcttatcaaaataccgaggcccctttcccgaattaccgtatgccggagagtaatatccgcttcgatgcccgtcaagcgataacaaactggaaccgtacgagtttcgaaggttcccttccgggggcggtctgcgtcggtaaggcggggaaagctcctttcggggagctggtggaacgtccgataccccagtggaaaaacagcggcctgttatcctatgtatccgtccgggaatccttgagaggcgataccctgttctgtcgtttgccctataatgcccagatcactccgtatctgaaagtagaggcggaggccgggaagactatccacatccggatggataattacgagggaggaagcgagcgcaacgtacgtgccgaatatattacccatgagggtgagcaggaatacgaaagctatggctggatgaacggccatgaggtctattacatcatccctgagggcgtgaaggtgctggatgtgaaataccgtgagaccggttacaacacggacctcgccggctctttccattgtgacgacccgttctacgacgagctttggcaacgttctgcccgtaccttatacataacgatgcgtgataattatatggactgtccggatcgtgaacgtgcccaatggtggggcgacgaggtgaatgagctaggcgaggctttctacgccctttctccgtccgggcagaaactagccgtaaaaggcatccatgaattaatgaattggcagcgggaggacggaacgctctacgctccggttccggcgggtaattgggataaggagcttcctttacagatgttggcgtctatcggttggtacggtttttatacacaatattattatagtgccgacagtagtttcgttccggtgatatacgaccggatgcgccgttacctgcacgaggtctggcaagtcgataagagtggcttggtgatcgagcgtcaaggcgcttggagttggggcgactggggcgagcacgtcgatatgggtgtattgaccaattgctggtattatctggccttgaaagcggagcgagccttcgccctgcaactcggcaaggataaggatgccgatgagatctcccagatgatgcgtagcatagaacgttgtttcgacacgaagttctggacaggttccgcctatcgctcccccggctataaaggggagacggacgatcgctcccaagccatggcggttgtttccgggctggcctcgaaagataagtatccggcgctgacgaaggtgcttaaaaaggagtatcacgccagcccttatatggagaagtatgtcctagaggcccttttccagatgggcgagccgacgtttgccttggaacggatgaagcaacgttacacccgtatgctggattatgccgaatatacgaccttgttcgagggatggggcatcggagccgagggcttcggtggcggcacgatcaatcacgcttggagcggtggtccgcttaccttattgagccagaaggtctgcggtatcgagccaacctctcccggcttccgtacctttaagatctcgcctcaactgggttccttatcggaagcctctgccagtctagagactcattatggaaccatccaagtaagtatcaagaagaaaggcaagcgaatgaagttcgatctccaaatcccggaaggcacctccgccgaactgataagaccgaacggcactcgcaagcatctcgacccgggacaccatcaagtggattagtgatctgtgtgtttgttatatttctcaaaaacagaagcaaagaataaatattttggtaaagaacggaatttatcctacatttgtaatatataagtattatatcgaaggatatggaaaaagagaaaaatagcaagattaccagagaagaggctttgcgtcggttggagaccgcacggaagctgaagcgagagtatgtagctaaactggaaaaagagatgaaagaagagtttaagaaacgtacagggcaagaagctacttattttgaagtatggtaagccttaaccttgaacgtataaattctaattctccttatgcggtaacagctcttagggattctatgtgtttccggtttgttacggactttggtgtgatttattatgcaagcagagtatgcgcaatcgcctttttgagttttggtttcattcctcgccgcgtaaatctgatttcgctttcatgtctgcggacatccgagatgcagatgggatacagaattatgcggcgattattattcgactcgataatcccaatttgaagtctatagtcgcggagtttactgaaacaatacaaatgcttagtcaaaagccggagtaaaatgtatgtgttttctccggcccggggcaccattgggtggattagcgatcgccctctgttttcctgcggacatacacccggtggcttccataacccgatatggtgagcccactcgccggatcgctgctgagtcgtagtagctcccggtttgcgctactgcgttttagtccggtgatagccatgtagtcttgtatgcgcaagaatgggtgttcgtgaaggtaatccaatgcccgcgtccggcgctcctcttcggtgaagggcgatttccatacacggctgatacctccccgtcttaagtcgcaacgcaggttagtttcccgtaccagttccttgtcggcccggtagttgatgccattcacctcgatgctccgtgcgttacgcttcggttcgtcaccatccagcgagtcgatctccttgtccttcgctacgcctaggcggggcgtgaacgtaccgatgccatccaacgtgaccgactgcccttccgccatgcaataggccagatgttccgctactgtcgtcatcacctgtattacgctacccctgctcaagcccgatccggggtaggtgatccgttccacgaaatcctccatatccatgttccgttgtatcttcatccgataatacaccggcttttcccccgtcccgttcaggtcgcacatctcttgcttgatatattctgccataactgctactaggtataattgtttgtatcttcaagttaaaaacattcttcttactatatacaaatatacttattacttgatctatttccaaattatcaccgtggaatgtatagaccacgtcgtgatttgtatattccacgtcttgatctgtacagaccacgtcgtggtttgtagaattatacagtatgcgaacaagaattcatctgctaccgataaggtatttatgcggtatcggagcgttatttacttagggagaagcgggcaaccctcacgtttcctctgccaagtacgtcgaccaaccctgcgggattctctatcttccctaaacgggtatagctgtaagacgaggaaaaggtctcgtagaaaaggactaccgtattcgctccccatagaagtaggtcgcctgtatggattatacccggacgtattggtcgcgatcaagagtattatactcgttttccctgctcgtatgcttgcctcaaggtcgggttcccttcgacctcgcccacgtgccacacaccaccgcagaatagcgttcctttcacggtcgggttctccagacagtcgaggaatcccataaagttggccacaatgcgatccatgatgccgttatcttcttcagcggccgtggcgatgaagtaaaactccttgttttttatttcggtataaggaccgcagcaacggtctatcagcgtcttcatctgtgcgctcatggcatagaaatagaccggcgtagccatcacgatcacatcggcggcaagcatctttccgataatctctgccgcgtcatctttttgtggacaaggcttcttgtattggctgcacacgccgcatcccgtgcaggggtgaatggtcttgtctcgcagaaaaaccttttccacacgatgaccgctttcgatcgccccttgcataaactcatcgcatagcgtatcggaattgcctccacgacgggggctggaagataaaatcaatacatttttcatgtttactgttatttattaggttctacattcatttttaggatacaaaaatagcgagataatccctatcttgcggtagacaaattacggatgttatgaccctaattacataataatacggaagaatgatcacaacggactccggtgagcaagtcgaggcacttgctcccatcatcatttcggccagccggtcaacggatattccggccttttatgccaagtggttctttaatcgtttggccaaggggtattgtgtttggtataatccgtttaatcggcggaagatgtatgtgtcgtttgagcggtgtaaggcaatcgtgttttggacaaagaacccgaagctgatattgccttatttgcatgagttggataggaggggtatccattattatttccagttcacgttgaatgactatgtgagcgaaggctttgagccgaatgtgccgagcgttacgcaacgggtggagacatttcgggagttgtcggaaatgatagggaaggaacgggtgatctggcgatttgatccgttgattatgactccatctatcacgcctcgtgtcctgcttagccgtatttggaagatcggcaatcagttgaaaggatatactgataagctcgtgttcagtttcgtagatgtaaaggcgtatcgtaaggtacagaacaatcttataaaagagacgaattgctttacgaaagaggatgtggaaaccgctgagatgaatgcgacgcaacgtcaagaaactgtagagggattggtgaagttgagggaaatttgggcttctactggttggaatgtgacactcgctacttgtgccgaggatattgaccttacggtttatggcattgagcataaccggtgtatcgacggtgatttaatggagcgtgtgtttggggaggattatgaattggtttattatcttcgaacaggccaattacccgaaccggatctttttggtacgtttcccgctttacccgacaaacgcaaagacctaaaagacaaaggccaacggaaagcctgtggttgcatgataagcaaagatatcggtaggtataacacttgctcccatttctgtgtctattgttatgccaatacaagtagggaatgcgtacaaaagaatgcggtacactattcggacgatagtgaaagtttgattcgaagttagatttgaaagcaaggtcaaatgaggcggcgtattaaattaagccgtcttttatagtaatcgagaccaatactatcctagaatagtgttgtataacatgccggatttacctatttttgcgcccaatacgaaaggttaagaataggaagttttaggtatggcaaaaaagaaaggtaagcctcaaccccggaaaagcaagaagaagcgggcatcatcattcatgtcctctgtaaagaagatgcttcttggcgtttttgcggtagttgtttgttttatcggtgtattattcatatataactggttttatccggtatccaagacacggcttgtagagaagaaacaggatcgggtggaggcaatagtccgtccgaagatctcggacaaaggcggctccggaacatcgggtaagaaagccgcacaagcgacgaaaaacaagcaaacgacgaacccaaagaaagagacctccgcttatacttttcaagggggagctgagataccgagactaaagaataaacaaaaagagcaggttataaagcatgagggctatacggtttcttataattccgattataagatcgccaattgggtagcctatgaactgacctcgaaagaggcgacaagtaagaagaacgagcggtctaataagttcgtctcggaccccatggtgaaaggggctaccgccacgaacgaggactatacccgttccggctatgaccgaggacatatggcgcctgctggcgatatgaaatggtccgccaaggccatgcgagaatcattctacctaagtaatatctgtccgcaaaagcccggcttgaaccggggtatctggaaagatctggaagaacaggctcgtttgtgggcgaaagagaatggctctttgttgatcgtgaccggcccggtgatcacggacgacctgaaacgattaggtaagaatcgggtgggaatcccgaagaccttttataaggtaatctgtacgataacgaacggtaaaccggaaggggtaggttttctgtttgataataaagactatggaaagactccgttgaaatcgatgatgatccctatcgatagcgttgagaaggttaccggaattgactttttcccttctttgcctgattcgatagaaaatccgatggaagcatacgtgaatgatggtagttggtctttttaaggcacgttatgctcaacaatctctaggcgagaatgttttatatttactgtgaagaaaaagaaatcataattaaataacaaaatgcaagttatcatgaaaggaaaattaatccctgtgtttgttttggcagcattggtttcctgtagtcaaccacccgttaaggagcaaggtcctcgtccagttaaattggcggacgttacttcgctgaacatggttgagaaatcattcagtggagtggtatcgcccgatcaattcagtgatttggcgtttaagatgtccggcccgctgatctcattaaacgtggatgaaggccagaaggtccgtacgggacagatcgtggccgagatcgatccgctggactttaaatgggaatatgaggcgaagaaagcgtctttccagaccgctgaggcgcaattgcaacgtgcgaagaagttattgtccaagcaagctatctccaagcaagagtatgagtctacggaagcctcttactcaaatgccaaggcggctttcgagtatgcgcaaaacacattgaaccagacaaagcttcgtgcgccgttcgatggatttatccagaagaaatatgtggagaattaccagaaggtacaggccggacaaggaatcgtttgcttgatcaacccgaataagttacaggtcgtgtttacgatgccggagagtaatatcaattacttctcttctccttattctgtttatgtggaattcgataattacaagggcgttcgttttaaggcgaaggtgaaagaatacgtggaagcctctccggatggttccggcgttcccgtatatctgtatatcgacgatccgaactttaatttagagaaatataaggtagccgtaggtttctcttgccgtgtgatcttgaacgtggatagcgagagtttcacgcaaggcgccgtattggttccgctagccgctgtcgtggctgacgatgccaatagcgataagtatgtgtttgtttataatgggcagtctcaaaaggttgagcgtcgcaagattaccgagtctatgctgatcggcaaggatggcgtgatcgtaacggatggcttgcgacccggcgaacaggttgtctcagccggagccactcgtttggtggatggacaacaggtaaaagtattaacagattaagagataaacaatgaatattccaaaatattccttagagaatcagaagattatatactttttcctagcggtcatgctgataggaggtatatattctttctttaaattgccgaagaaggaagattctcccttcgtaatcaagcaagcggttttggttacccaatatccgggagcgacacctcaggaggtggagaagctggtgactgagccgatcgaacgggagattcaggctatgtcggatgtgttccagatcaaatctgagtcttatttcggtatgtccaagatttctattgagttgcagcctaccttgtctccggattatatgccggtcaagtgggacgagttgcgtcgtaaggtggcgaatatacagcctcgccttccgtctggcgcctcctcgatatccgttagtgatgactttggtgacgtattcggaatttattatgccttgacggccgatgagggatatacttacgacgacctgcgtaattgggcacaaaagatcaagacggagctatctcctgtaccgggtgtacagaaggtctacctattcggtgaacagacacaagttgtcaacgtaaagatctctatcccgaaactggctaacctaggtatcgacccgaacgctatccagcaggtgatgcaaacgcagaacttgttggtgaatacgggagacatcaataccggtaattatcaattgcgtttgcgtgcggaaggtacgtataaggatatacaagatatccgggaccaattgatcgtgacgaaaagtggcggtgaggttcgtttgggagatatcgctacggtagagcgtggttatatggaccctccctcgaacctgatgcgtgtggacggtaagcgtgccatcggtatcggtgtcgctaccggttcgaaagacgatgtggttgccgtgggtaacgccgtggcggatcatttagcggagatggagcagctgttcccggtgggtatggacctgaaaacgatttatccggagaacaagatcgcggatgaggcgaacaacggttttatcttgaacttgatcgagtcgttgttgatcgttatcgtgattatctttatcgtgatggggtcccgtgccggtatgttggtcggtagttcgttgttgttctcggtaggtggtaccttattgatcatgttgatctggggtgtcggcttgaaccgaacctcgttggcggcctttattatcgctatgggtatgttggtggataacgctatcgtggtgacggataatgcccaagtcggtatcaagcggggactttcccgttatcaggcgttgatcgatggcgcgacgaaaccgcagtgggcgttgttgggcgctacctttatcgccgtatgttctttcttgccgatgtacttggcaccggcatccgtggccgagattgtgaaaccgttgtttatcgtattggcggtatccttgggattaagctgggtcttggccttgacgcaaacgactaccttcggtaattttatcttgaaagaggcgaaaccgggtgagaacaaagacccgtacgatacgaagctgtaccataaatttgagtcggtattgggccgtttgatcaagcgtagatatgtaacgatctctaccgtggtagctacgttattcctttccttgttcgtgatgagcatcatgccgcagagtttcttcccgatcatgagcaagccttatttccgtgcggacttgatcttcccggaaggatatagcatctacgacgtggagacgaacgtgaagaagatagaagaggaatatctcagcaagaatgagaatatcaaatcatactcgtttaccttgggaggttcgccggtacgttattacttggccagttcttctatcggcccgaagccaaacttcgccaatgtgttgatcgagacacaagatccggaggatgcgcaagcggaagagggtaagttctacgattatatggttgctaactatccgaatatattgacccgttcggctttgttcgccttgtctccggttccggatgcggcgatcgagatcggttttatcggcgataacgtagacacgttggttgccttgacgcaaagggcgcaggagatcgcccggaattatgatcaggtgatggaggttcgcaatagttggggtaacaaggttccggtatggaagccgctatattcccaagagaaaggtttgcgtctgggtattacccgtcaacaggtggcttattccttgcgttcggctacgaatggcgtacctttgggtgagtatcgtgagggcgacgtgtttatgccgatcttactgaaagatgcggataaggattctatcagtctgaatgatataaagactttgccggtttatagcgctaaaggccgttcagtaaaagtggagcaggtgatcgatgatttctcgctggattatgagtttaacgtagtgagacgattcaaccgtgagccgtgtatgcttatgcagtgtgagccgaagcgtggcgccaatacgatggctgctttcagtcatttgtggaaagaggtacaggagaagattcaggtgccggaaggatataagatgacgtatttcggtgagcaatccgagcaagataaaggtaataaggcgatcgccgctaatatcccgttgatgttcggtttgatttatgtcaccttgttattcttattcccgaaatattaccggaaaccggtattgatcatggcgatgctgccgttgatcttcattggtgtggtattgggattgttggtgttcggtaagtccctcgacttctttgctatgctgggtctgttgggcttgatcggtatgaatatcaagaatgcgatcgtgctggtggacgagatcggtttacaattgaacgcaggcttgtctccggtgaatgccgtgatagaggcaacgaaaacccgtatcgttccggtgacgatggcttccggtacgacgatcttaggtatgttgccgttgttgggtgacgctatgttcgccggtatggcggctaccatcatgggtggtctgttcgtatctacgatcttgacgatcttcgtgcttccggttacttattgtgttttctttaagattaaatcagagtaaaaggtatgagaaataaaataatcataggttgtttattgttgggtgccttgtccgctaaagcgcaagacacccggctatcggctgtggaatataaggaacgggtccttgaatacagccgtcagatcaagcaaagctctgaggagcgtatcgctatgcagcatgcgatcaaggccgctaagaccggtttcttcccttcggtggacttctccggcagttatcagtaccgtatcaataaatatgatttggatttcggaccgggcatgtccgtagagatggaccataatacgtatagcctaggcgctacggtgagccagcccatctatgccggtggacagatctataataactataaggcagctcaggtacaaggcaagatcaccgagcaagcggaagaattgacaacggataatatcgtttattccgccgatttgaactattggacggccgccgcacgtaaaggtatgtacgatgtgatgtgccagtatgtagacattgtcggggagttggcgaacgtgttgacgatccgtttcaatgacggccagatcagcaagaccgatttattgcaagtggagtcccgcttgaaagaagcggaattgaataaaagctcggcttataaggagtatcagattgcgttacagaacctgaactcattgatgggtgtgtctccgttagacccgatcgaggtggaagattccattacgacctatttggccttgccgttgcaagtaggagaggatgtagctcttcggaatcgtccggactacgctatttccgagttgaacatagagtatcaaaagagacagatcaatttgtcgaaggcgaaatataacccgtctttggcgatcggttttcaaggtacttggggtacgccgatgttgaacgtgaaaggttcggaccagttgtggactccggccgtcttcgcttccttgaagatacctttgttccgttggggagcccgtttcaaggaggtaaattcccagaaggccatccttcgtagtaaggaatacgccttggacaatacgcgtgataagatcgctcaagaggtagcgaacgcatggacaagcctaaccgagtatacgaaacaaattaccgtcgcggaagaggcttgtaagattgccgaggagaaccttgatttgaataccttcagctacaacgagggtaaactaccgatcttggatgtgctctccgcccaattgtcatggattcagtcttacagtagcttgatccagacttggtatcagcaaaaggcttctttagcccaatataacaaggctataggtatccggcgtttgcagtaaaagaaacatatttatacttagaagacaaggtcccttattttggaaacgagataagggaccttctttatgaaataaaacatcctttattccgttaggtaaactgaagattgctacatttgcatacaatctcgtctgtttgggacactccttggaacccggacttttaagtagaatgatgaaataataagatgtatacaaagttactagataaacaaacgaaacttgccctaatcggactaggatatgtcgggcttcctatcgcgatggaattcgctaaacatgtttccgttatcggatttgatatcaacgaggatcgcttggacaagcttcggaactgtattgatccgtgtggtgagcttcctactgaggtatttgaacataaagatatcacatttacttcttctatagaaaagttgtgggaggcttctttttacgttatagctgttcctaccccgatagacagccataacgagccggatctatcccctttgttgggtgcgacccgcacggtaggcaaagtccttaaacgaggcgattatgtagtatacgaatctaccgtatatccgggatgtacggaagaggattgcatcccgatcttggaggaggtttcagggttgagagtaggagaggactttaaggttggatattcaccggaacgaatcaatccgggtgataaggtacataccttggtaaataccgtgaagatcgtttccggctgcgatgccgaagctttggaaacgatatcggaagtctataagctggtcgttcaagcggggttgcaccgtgcgcctagtatcaaggtagccgaagccgccaagattatcgagaatacccagcgtgacgtgaatatagcccttatgaacgagctttccattattttcgatcgaatgggggtaaatacgtttgatgtattgaaagccgccggaacgaaatggaatttcctgcctttctctcccggattggtaggtgggcattgtataggggtagatccttactatctggtgcataaagccaaagaattgcaatatcacacgaagatgatcaactccggtcgctacgtgaacgattccatgggacggtatatcggaaagaaggtcgtgaaaaagattatctcgcaggggaaaaatatcctaggagcgcatgtgttggtgatgggtatgacttttaaggaaaacgtatcggatatacgtaactcgaaagtagccgatattatcaatgagtttaaggacttcggagccgaggtcgatgtgatggatccgttcgcttcccctttggaagtattgcaagagtacggtatccggttagtagagaggcccgggaagaaatatgatgcggtagtggtagctgtcgctcatacgacttatttgaagctggatgagtcctacttcatgtcgatcacgaatgaacatgccgtgttggcggacgtgaaaggagtctatcgaggtagcatccatcagatgatctattggagtctgtaattgttaaaaagtaacacaagctgcaaagaagtttcgataaacttaaaaaaatgtgttgtacaatatctttttttatttgctcaattatattaattagcccatctttgcatgcagataacctaaacaatctttttgccttaaagactaatacctattaaaaacctataaagagagcctttgcgaaaaggctctctttatgattttcaggggattagtagttcgtttcctctatctttgaggtgattctgctaatagcctcattcagtttgtcttcgggtaatattacgttaaaatctccccagaaaccctcgtcgtagttgaagtgagtatccgagaaaaccgtgcgggttggaagggattcaatgcgtgagaagcggttcacattggctgtatctatcttacaggtaaccatttcgaaccaagtatgtaaaatatttgtgttaaaaagttgtcttctttttttaattttaaaacgcagatctccccggatatggttaatgtagtaggtgccattccattgcttgtaagataccgtataggctactttctggggcgtgatccgtaaattccggctttttctctcgacgaacatgccggccgcttgctcgatatattggggattgacctcaaagtccacccttaataaggcattattttccatgtcgatatatatctgtccccgataaagcggttcattgatactctttcgttgctcgaaagagatgacgttagcaagtcgatcatccactaccgtgatgtcggtatgggcgtatgtatagggtgaatccgggctaggatccagaaactccggtaactgtttcatcaagtccaagacaaggcaggagtagatacccgacttcatttttgtgatcaatgtgtccttttcctgctcgttactgatgcggcgcatctttagtagtttcacttgatcggccaaggcattgctgtggtaagatgccttatataccttaaaaacagcctcggtcagtcctacgagtccttttttacgttcaacgccttctctgtaaaatgtggtaaggtaaatcgggtgctgggaataattgcttcttctcttgtccagcatctcctgtaataagcgtttcggattggttagacgcacgataacttcttggatagagattactttaggctctagagataagacggtatgtttatctattaactcccgactatctatctcttggggaagatagccgatatgagagaaacgtaccttggataaccggagtgagtccggtaatttcaatcggaactctccattctggttggtgatggtgccaatagcggcctcaccgattcctaccgatccgaacgcgattggctcatgggtatattgatcctgtaaagaaccttctatcgagaaataggtttgtatggaatcgggagttacggatgcgcttttaggagcggagggactctctggcagataaagcaagagatggttctctatcgtacggatcgccagatttttattaccggtaatagcgtatatggcttcttgtatcgtataatctccaccttttatcgatgttgtttgttcgttatcgataatcttactgtcgtatataaaaagatagccggaacgttccgtgacgagtcccagcaattggtagatatttccttttgatttaggcaatcgtatgacctgtcccagtacgttaccattctgggcattcatagggatgagagctacgagtaacagcaaccatcctacgatcagctgtctcaaggttcggaaatcatccatatattattttgttgcgtacattttagttttaacgccgcgcagatcagttcagccatcgtcgcgggtgagttattatagaaactaacggtcagccgtctattctctaaatcagccgttgtcttcaatggcatcatcggatactccagattaattacatgcaagatatctcctaagcgctcatccttaaactggatacggcgggtgtaatcggaaaattgttcgttatcttgagtcggagctacttgtaaacggttggagaataaggatacggtttgaccggcctttacaagcgtttgttctccgttcttcttgagtgtcactttcactaatccccggcgaacggccaattcaaaggcgcttttatccgagcttttgatattgaatgaggttcccaatacctcgatccgggcctgctctgtctcgattaggaaaggacgttccttattcccgcttacatcaaaaagggcgtttcctagtagagacacctctcttttttctctttggaaatgttccggatagcttaactgactgttatcggccagataaacgatagacccgtcttccaaagtcgtgaccaaggtggtggaagcctcgttattatgcagggtgagcagagtggtttccggtgtccgttctcgtccaaggaaaatagccgtagctaccgatacacagagtataacgatagcggcggcccatttcataagtccgatccggtatgggatttgtgtaccggaaattggcttatccagcagcccgtcttgctccaagcgagtgtataattgttcccatgcttggtctgtcttcaatttatttttttctatttgattcataactgttaggtataattctcgatttcttttcttagtgtttgtagtgccttggtcatttccgcttctactgtctttatggacaatgagaggctggaggctatctccgcgtatttcattccttcgaaacggtgcatccgaaagatccggaggcggcgttcgggcaatttacctaatgcccggttgaccaaggattgcaattctttgtactcaagttgatcttgcggggtatacgattcggattccggattctctccggctaaaaccgtattccggtatcggtatcgtacttcccgatgctccagatattgtaaggaccggttccgggtagctccataaaggtagttcttgatggaacgtaagattggaagagattctctttctttccagaatacataaaacaagtcctgaactatctcctctgcgacttcctgctctcctgttatactggttgcgtacaggcaaagaggggtataataaagcctgaaaatactttcgaatgctttaatatccccttccttgatctttttgagtacgaacaaatccataataatttggtttcaacagataattgataatggacaaagataatgatttgtccatatcattgtcgatagtatatttacacggtcaatttttatgttgcttctttaatttatataccgcattctccaaagactcggtaggctcgataatgttgtaagctccccagaagttctcgtcggcgaagtccgataccttgtcggatagagactgatccgctttaaaagacatccggtaggggatggagttattttgttctttaccatcggtaacgaccatctcggatacgatcgtgtagttggtagagaagagttttcgtttccagtcgcatttaaagcgaacctcattgcggatataactcagatagctcatgccgtcacgttctttgtaagttacgaggaaagctacctccacgggtttaaatcgcaagccaaaaggctttttgcggaggatggcctcggtagccttattccggtcatccatgctgagggcgaattccgcacggctgaaggaaagccgttccttatcgatatacaatttaccgtaatataaggcgtaaggtaagatcgcttgaggttggaaactgattacgtaatgcggtcggtcgtttaacatcacgctttcttccatacggaaggcgtaataaggtaagatattcgggtcgagcaataaatccggattcttcaccacatccacgtaaacggataggttagggcctcccaataatttcacggctaatgtgtcgctagccttctcgctcaataatttacgtcctttatagatctgtacccgatcccgttccacgttcctgtccttatagggagttttgtaaacatcgataaccgcttccgagatattgatgtaacgacggcctttttgtgcggtctcccggtagaacccggtaagcatgctacctgtggcgatgtaattcttatttactttctcaatcgcttcctctacgatatatcgaggatctccggcccggataatgacttcgctaagcgtattcatgttcggttcgagtaataccgtacattctaatatgtccttatcgtttacggggatcaagccattcaaatatccgatatgcgatacttctacttgtctggcatggaggccgtttttcactttgatagagaactcaccgtcattattggtgatcgttcccacgttggttcccggaatagagatatttacgtattccagtttttttcgtgtttgcttgtcttttactacaccgctgacagtgataaactcatcgtctgcgctatcctgtgcctttatagaggttacaccgcaagccaacagtatcatcaggataaatcccatagtttgtttacagagcgctttcatatttgtattgttttaatggtaaataatcactttgtacttatatgatcgcccaggaaagaaataccctatgggatttatcaaaaaaatcacacaaccttttgtccgggctgcaaagtcaacatttctttaggtaccgctttcttgatgctctctattaaaatacccgctacggtatgccggataaaatctttacgggtgacaaagacgatctcccgtgtcggcttgggaatggcgaacggacgtaccaattctttctgctctttacttaactgcagggtagccaattccgggatgaacgtaataccgttaccgctttccaccatacgcataaatgtctctaggctacctaaacggtaagcggcttggcgaacctttaccttctccatctggcagaaacgcatcagctggtcacggaagcaatgtccctcgtccaacagccacaaccgctcgtcgttgatatcggcggtacggatcaaatcctttttgaatatagattcgttgtgagccacgtatccgaagaattgctcataatataatatatctccttgtaaattggattcagtgggttggttcgctatgatagcggcgtcgatttccccgttttgcagggcggccatagtgggagcggttttcatttccagcatacggatgtcaagatccgtatgcttttccgataattgctggaaaaagcgaggtagtaaataaggggcgatagtcggtagcaccgctaagcggaacgtacctttcaatgactgttcctcctcgttcacgatatctttgataagagaagcctgatagaggacatttctcgcttgctcaataaccttacgtccggcaggtgtggggcgaacgggttgtaggtttcgatcgaacaatttaatacctagttcgtcttccagcttttggatcatcatactcaatgtcggttgtgtcaccctacaatgctctgctgcctttgcgaaatgacgataagtatccaccgctaggatatattcgagttgctgtatattcatagtacttaattttacaagcgttagaaattaatgaagacaaacttacggaaaaacgctggaataatcgaataaaagtggaagaataaatcagcttaatttgagtattaggcatttagggggaaatcggagaagttgggtgaaaagccaaaatacatttgcttatcatggaacagacgaatgggctaactggatgatagatttacacagaaaaaatatgtaactttggagagtaatttacaaatggtttacagtcgtatatataatgagctaaaaaattaattgattaaagtatatgtcagacagtatcgtcattattcctacatacaacgagaaggagaatattgagaatatcattcgtgccgtgttcgggctggagaaagtgtttcatatcttggtgatcgatgatggctctccggatgggacggcggctatcgtgaagggcttgcagaaggagttcccggagcgtctttttatcgtggagcgtaaagggaagctgggattgggtaccgcttatatccggggttttaaatgggctatcgagcataaatatgattttattttcgagatggacgccgatttcagtcataatcccaatgacctgccgaagctatacgccgcttgtaccgggcagggtgccgacgtagccatcgggtcgaggtattgcaacggggtgaatgtggtgaactggccgttgggccgtgtgttgatgtcttatttcgcctcggtgtatgtccgtatcgtcacgggtatgaagatacaggatacgacggcgggctttaaatgttaccgccgtgaggtgctggagacgatcgatctggaccgtgtccatttcaagggatacgcctttcaggtggagatgaagtttacggcttataagtgcggcttcaagctcgtggaggtgccgatcatctttatcaaccgtgccttgggtgtctccaagatgaactcttcgatattcggggaggctttattcggcgtccttcagttgaaatggtggagtttcttcaggaagtatccgaggaaacatgcgagccatgcctaatgaaaacagagtttgacaatttataatagaataagaaagatgaataaaatattaatccaaaatccgagaatcatcaacgagggccgttcttttatcggctcggtgttggtggagggggataagatcgcggcggtgttcgagggggaggttcccgggaacgtgcgtgccgaggcgaaccaagtgatcgacgctacggggaaatggttgataccgggcgttatcgacgatcaggtgcatttccgggaccccgggcttacccataagggagatatcgggaccgagagccgtgcggccgtggccggtggcgtgacgaccttcatggacatgccgaacacgaagccacagaccacgacgatcgccgatctggaatggaaattcaaccgtgccgccgaggtctcccgtgcgaattactccttcttcttcggtgggacgaacgataatatggacgagatccggaggctggatcgtagccgtgtgccgggattgaaactcttcctcggctcgtctacgggaaatatgctggtggacaagaaagactcgttggagcgtatcttcggcgaggccggtatgctgatcgccatccatgcggagaaagaggaggtgatccggcgtaatatccagtattacacgaacctgcatggcgaggatctggatatctctttccatagcaagatccgtagcgaggaggcctgctaccaatgctcggccgaggcggttgaactggctacccgcttggattcccgtttgcatatcctgcatctctccacggagaaggaattatcgttgctcagtaaccatcttcccttgagcgagaaaaagataaccggcgaggtctgcgtgcaccatctgtggtttcatgacggcgactacgcccaattcggtaatcgtatcaagtggaatccttctatcaagacgatcgaggatcgcacggcgctgcgtgaggcggtcaataacaatacgatcgatatcgtggctaccgaccatgccccgcatctaccggaggagaagcaaggctcttgcttgaaggcggcttccggaggaccgcttatccagcactccttgatcacgatgttggagctggcgatggaaggccgtttcacgtacgagaaggtggtcgaaaagatggcgcatatgccggcggagctgtttcgtatcgataggaggggatacatccgtcccggatactacgccgatatcgtattgatcgatccggagcagacttggacggtatcgaaggagaatatcttgtacaaatgcggctggtctccttttgagggctatacgttccaccatggtgtatggaagactttcgtgaatggcgagttggcctatggcgatggagtggtgaatgacgccgtgagaggtaaagaagtccgttatctatagtagtagagacggggcatgcccccgtctcatcctatctattggatatcgatcagtttatgggtttgcagacttagtctccaccggggatgccggaggatgtaatccactacctctttcgtattttggcaggagcagggttgcaggaaatggtaccgtgcggggatttcggcgtatgcggacaggtcttgcccggtataaaccacctttatctcgtcgactctttccaataccaccggggcgttctccttgggcgagcaagtcacccagtcgatgccgtcgggcaaggggcgtgtgccgttggtctcgatacagatctgtttccccgcctcacgtaagcgggatataagcgccttgtcgatccacaggctaggttctcctcccgtcaggatcaccatccgtgcgggaaaggaagataccttctccacgatctcctcgtccgtcatcattacgccctcctcgtggcgggtgtcgcagaagctacatctcaggttgcaaccggagaagcggacgaatacggcgggagtccccgtatggaacccttcgccttgcaagctgtagaatatctcgttaatcttcctcatagatcgccgtgttaccctcagactcttttacctctaccttgaaacaagacgggatctgctcgtatacccaaaaggctatgttctccgccgtcgggttgaaaggcaggatatcgttcaagttctggtggtccaacagggatttcaccgatctcttgatatggctgaaatcgactaccatgccatcggcgtttaattccttggagcggcaataaaccgtgatcatccaattgtgaccatgtagattctcacatttgctggggtaggacaatctcaagctatgggaagcggagatctccatacgtttaattacggtatacatacgataataatgtttatacgataaataataatgtacctaatgtcacctcggcacacaaaaaaatcccggatattaatccgggatgcaaatatacgaaaatatttagtttgtttgtacgacacttgtctacgatcggtagggacaggcggtacgtcgaccggctatgcctcttggttcagcgccttcatcgagaacaggaaggtcgttcctttgccctcgccctcggactcgaaccaaagctttcctccatgaagctccacgaagtccttgcaaagcatcaatcccagaccggagcctttctcgttcttcgtcccgtaggtcgtgaaatgcgagtcttgtttcaagagcttgtcttgatcctctttcttgatgcccttgccggtatctttcacgctaacggttacgaaatccccctcggagcgtgaggataaggtgatcgtgcccccctcgaaactaaacttcatggcgttagagatcaggttacggataatcgtcttgagcatatcgatatcgaccaagcctaccagctctttatccagattttctaggataatcttcacgcctttttgcgccgccatcgggacatacatctcggcggtactatcgatgatgctgtttatgtcggtctgttgcttatatacgtgctgcttgttcaagcggttcttggcccatttcagcaggttgtccagcaagaggaagatctcctcggaggtcttgttcatcatctggatcatctcgtacacctcgtcgcctacccgctccttgtccaccatcatcaagatggcgttattcatcattttcaacgagcctagtggggaacgcaggtcatgggcgataacggagtatagcgtatccctagactcgatcgtgttctccagctcggccttgatgcgcttaatgctgtaaagctcgtagcggtgggccaccctcttcaccagctcctcacgttggaaaggctttgtgacgtattcggtggcgcccaattggtaacctttcacgatgctttgcatatcgcttagggcggacatgataatcacgggtatatccgtagtctcgggattgcttttcagatgctggaggacctcatatccgtccatctcaggcatcatgatatcgagtaatatcagatttgggtgtttctcgttagctatgcgtagcgcttttgtcccgctgtcgcaagtcaagagcgtatatccctctttcttcagtatggcttgtactagcatgacgtttgtagggacatcatctacgataagaactttatactctgaggccaatttatccattgtatctaaattgtgttctagttttcttgatattcaaatagtatcaatagcgcaaaagtattaattaaagtcgacatataacgactatttatccatctatttttttatttttttatcctgcgcctcgtttggctttttcccaagcgcctgtgcctttatgcttagcgagatagctataccctcgtatgacattgatattcatgaataaaaagtaataaggaatgaataatagcttgttccggatgttccgtttttccattttataccccaagtatcccagcaggtaaaacgctaattgcagggcaaggatgaccgtgtaaagggtatgcccggtacaggctaggagcaggttgaggggcaggagggcgaagagcacgaccggcgtcagcgtccagcgcagtacccggtggctgatgtattggaagctcagtatcccataccggaacatattcaataatccccgtagccgccataccgattgcaatcctccggccgatatgcgtactttacgtttctcctcctcccgcatgttcagggaggcgctctcgagggcgtacgcctctttgctgtaggcgatcttgtagcctctcatcgctatgcgcagggagaggatgaaatcgtccagcagggtatccgggggcatctgctcgaagagggaggtacggatggcgaagagctcgcctgccgctccgacggcggagtataggcggtagtccagtcgcttgagggcggactcgtatttccagtatatgccttctccggcggtggctccttgctcggcttgtatctctacccgtttctctccggccacgcagcctacccgtgggtcgctgaactggcgtatgatctccttgatggcgcccttgttcagcatcgtgttggcgtcggtgaagatgacgtagggggtattgacgtaggggagggcccggttcaaggcggcggtctttccttgtcgccgcggttggtacagtacggtgacctccgggtactctttcagtctttcattcgtgttgtcattgcttccatcggtgatccagaccagtctcagcttatccgccggataatccagttgtctgcaattcaccatcttgctcgccacgatcgcctcctcgttgtaggcggctatcagcaacgtggcctccggtagtgtctcgggaaggcgggggagccgcggtttaacgaacagctccttgatctttaccataaggtataatacgatcccataccccagataggtatagaaaacgatcccgatgccgatccagaagaggatctcaatgacttgacagctcttttccataaaatctatttaattgaagtgaaaccatttttgaagtatatccttgattttaaatttgatggctaaattcaccaaattgatttttatagttataggtaaactgtaaaaaatgtatatagcaagaaaacgaaggtaagaggtactacagataattcggttaggtagttggaaatttcgagttaataaagagcatgcgagttttttcctttcttgtttttccattttgttatctacacataatattctgtaggcatgatatagtcccatgaacatggtatcgaagagcaaacagggataaattgagtgtgcccttaagtgggctatataggctctttttgttttttctatttctgagtagctgatacttaatttcatcgaatacccttgtgtcttgatctttgaggttgtggattctggatttatagtataatacaaggtttgatcggatattaattgacaagactttgcggatataataacttgatatgtgaaccagcaatcctctaccagttgatgaggtatacactgtatattatgggattttaaaaagtttaaattataaagtttgttccagctcattacatatatatcattgttttctgcatatcgatattgtgcgactggtaaatcatctccttggattaaaatagggctatacgtataagtagggtaggtctttcctgagagatctttcttcatgtgtgatgctgcgatgaaatcaacaggatgttcttgcattttatgtacgagaatttctatgcatgtagggatgatctcatcgtcactatccataaaaaaaagatactcgccttgcgcattatcgatggcagtatttcttgtagccccaaggccaatattatacggatgctcgatgatacggacatcctttcctcttggatgatctttaataattctatggacaatgtccatggaatcatcttgccctttatcgtctactattaaatattctatattatcatatgtttggtttaatgcggatagtaacgctctttctacgaatagagacacgttataaataggtattgctaaagaaactttatacataactttgttattttgagttattatttatgaaataaataccatcttttattcctttaaataaaaatggaataagatggaattttgcttgaatcgtaaatattagaatctttttgcaaagagcaaatgtcgtttgatatatatatgaacatatacgaattcttttttttgataaaatgcgctgggcaaatatgagacgatttcgggtgtgataatatatacgcaaaggactctcaatacccacactagcgctttccttatgatagattatagctttgggctcaaaccaaatagagaatccagtcttttgaatttgagtacaccaatctaactcttcataataaaggaagtagaattctggcattttcccgaatttttgtatgtcaatcgccttgactgccatggcagctccatgagcgaatgaggtttcatgcgcttcttcgaactgtccttggtctaactgatcatagccaatggaggtgttccggagcgttatgtagctcattggtgtggaacctgcgtattgtaaacgttctttttcgggccaacaagctattttaggagagacgcatcctattcgaggattgctgtccagtctatttactaatgcttttaggaatggttgggtaatgattgtatcattgttaagaagtaataaataatagcctgtggcatatgatattcccaagttattaccaccggcgaatccaaggtttttctcactccgtataacctgtatgtctgggaacttggattggagaagcttatgttccagagggtcggtagaagcgttgtctacgacaatgatctcatgaggataagtctcatggatagccaaggattcgatcatctcgacggtatctttcaacccgttataattgatagtgataatggagacttttttaatcatggcttttttctttttttatcgttatgtcatgtggagtgctctgaaagctcgtatccttgttttttatccggatgaatgaggctatatatccttttatcaagacgcaaaagagaaaagggagcctcgacaggttcctgtagagcttccgggtatgcatcttccgggggatagccagcgtatacgtcaagatgctgaccagtattagcccataccatttcagggcaagcgggaaaaccgtgaggctccatgccaaggcgaggagggacgggatgatcagttttaatattctcgggagcgggaaccattggaccgccttgtccatataattccagttgagggtacggaggtcgagatgccgtatgatcaaagagaatgccagcagttgggcgtggaaccagcgggatctttgccgtgccatgacctcttggcgtgaggtcttctcgtcgtacacgaggatgtcctcggcgtaatcgacaaagatattttccgtggcgagatagatctccagctccttgtcctcggcgaaagtgccgcattggggcatgtgggatttcagccatccgaagtcgaataccatgccggagcctatcaaggaggaggagatcccgacattgacccgccccttgcggaagatggtgttgttgatctcctcggagataccgtcccataccgctatcggcgtattgtcgttcttgagggtacggtgcgcttgcagggcgatgttgtcttgcgtgatatcgttgacccgggtcaggaaatccgtatccgtgaggttgtcggcatcgaggatgacgaccttatcgattccccccttcaggtattccaaggcgtaggtgatggacttatgtttcatgctatgcttgaaatccggcgtgaggagctcgatcgggagcttggcgagcgcttggttcgtttcctcccgcatatggtccgataccacgatcacccggtatttgtccgccggatagtcttgcaggaggatgcgctccacggattcctgtatgacttggtcttccttataggcggcgaagatgacggcgaacttctggagccgtatgctccggtgcttccggtacctcctccgaaaaaaggacgccaacgtaaaaaataggtcatagcctatgaaaaaggcgatgaaaatgaatagggcgatatctatgtagatcaacaagtgcattcgcttttttttacaaaagtacttataattttcaataagagtttgattctgccgtttttttctcacctaaggaggccatatctttcccagcgagctcagcaccgccgagagtatcagcccccagcccagcaggttcaaggggccgggcgaggggtggacgagagcgagagtatcgccccgatagccgccagcgccgcctcccgcatgtctagcaggagggagagtgccgccagcaggaagaggctggccaaggcgagcaggcggaagtgggggaaaggggggcgtgggttccgtgggagtgtcggtcgtgtcatggggcggttgtttttggggcgtgtgagatcctaggtttagcaagaaatccagcaggctgcggacgaaggcaagtatttgtcgtatcttattcatatcaattgttgttttttagggatgagtaaatcggttcgatctcgtggcagagctgtaccagcgtctcccggtagcgctcccggttgtcgccgttcagctcgctgatgtaggggctgtaggcgatggccttggcgtagtcggcggggaaacggctcatggcggcggcctgcgggtaggagcagacgaggaggcgggcgaagtcgaggtaggagttgcgtgccgagtcgtagcggcggaacagcagctcgccccgcttgtatcgggcggtgacgcggcccccgtgccagaaggcgttgctcgccccgtagccggtgatgccgaaatggttgttggcctcacgggctaggcgggaggtgccccagccgctttctagggcggcttgggcaaggaggatgatggggttcaggtggaagcgggcgccggcggactgggcgtcggcaaggtgggtggagatataggcttgtttcatgatatatacgatgaattatggtttgatttttcttggaaaattaatattaaattactatctttgaataagttaataaataaacagcatcagtatggaaaagcgggagaccggtgtcggcgcctattatttttgtgatatagcgatgagttattttcccttattgtcgaagaagaaagcctcggataagctgtcccggtggatacgtgtcagcgggaagttgatggagcggctggaggagtgcggatggcatccccgccaacggatcttatcgccccgccagcgggagtgcatcgtgtcgcacctaggggagccctgatttagatttcgtcgggggattcgctgtcgcttcctcccggggcgggtgcgtcgggcacgatcttctcgaacttgacgaggctggtgacgctctttagcgtcacgctcggacggaagacgatccgaggacgtttgataagggaggcgttgaagtcggactccagcttggtgcccttgctgccgatcacggcttggaagtggccgagatcgcctagctggacggtctcccctttctggaggcgttgcttgaggatgtagaggaggccgtctaccacgacgtgcacgtcgccccgggaggcggtgctgcggtcggcgatctggtcgcacagctcctcgaaatcgcaggtgccggtggacttgttcacggcgtaatacaacttggagtcggcggcggctcccttggtcatgtcttttcgtaagactaatcggtacttgatcggcataatgtctggtgtttttttgattacgttgtaaaggtacgacatgccgccggtgggattccagttaacggggacgaaggggagcgaggtcgggtgaatgggggtaaagagttggatttaggggggataatgcttgtttgtcaagaaaaataaccgtatgtttgccttatcaaaattcgattgacatgaaaaatttacggtatgaaagagaaagacaagcggcgagacgtgagaggtgagtcccgtgaacgggcgaagtgccagcgtgagacgttgggcaaatatttttatgatttgtcaaaactgacgttcacggcgttggtgctgggaggggcgttgaccttcttccaagggtatgagttcaatgctacggtaatagggatggccgttttcggagtcgctgtttcgctggcattggtctggtttggtaatagaatcttaaaatgagataattatgaatgcgggattatttatctggggaactttagccttcatttccgtaggcttggttatttggtcgtacacgccatccggcaagcgttggttggatagcatgaaataaaaggactatcgtgtttccggtccgaacactactgtgtttggctccggatactactgtgttggcctcccgacacaatagtgttcggtgccagacacggtagtgtttttttgtgggcggctgatggttggcgggtcagccctccacccgcctcacgctctggcttcccagcgccctcccgatccggtcgctcaaggcgaaacaatccctcagttctttcaggcatgtcgcccgctcatcggtcgaggtagcggagcggaggcgtgcggccgtgcgttgtagccggtcgtgtatgaaaggctcggcgtagaggaagagctggcgttcggcctcgtcgggcaaaagttcgtcggggagcctttccggcggtccctcctccgggtaggaggaacggagggagaggatgagggcggagagagactcgtccgtgatcccgtccggatggctgcctcccgagaggagagccagcaggtcgagatgggcgggttccgtcaggggcatcccgccggcggacaactcggaggcgacccatgccgggagggagataccgctaccatctccggcgtagaacatccggtcgtgattggcgaggcagaaacgcagcaaggccctttcccggaggcgtgtgggagggaggcccgtcgccacttccgccggccctgtccggacaggctcgccgggagaggcggacaactcctcacgcaatacgtcgagggggatacccgtagccttggagagctcctccatccgccggtacacggccagcggagagcctacgagacggatctccccgagcacctcccgtatccccccggcgtcgggcccgcctttccgccccgccgcctcccggatgcggtggctcaggtaatccaccgcctctgtccgcacgagcctgcgcagcgcctcggccccttgccggcggaacacctcgtccgggtccatgccaccgggcaggggaaggaggcccacctcgcatccccgtgccagcaagagacgggcggagcggagggtggcggcctgtcccgccgggtccgggtcgagggcgagcgtgacgtgccccgtcagcctccgtatcacccgcacgtgatcctcggtgagcgccgtgccgcaaagcccggcggcgtgacggataccggcggcgtggaaggcgatcacgtccttgtaaccctcgcacagcagcacgtcgccctcggtgcggacggccctcaccgcctcgtacaggccgtagaggatacgtcccttgttgtacgcctcgctgttgtcggagttgacgtatttggctgttcccgccccctccgttccccggtaccgcccggcgaagcccgctatctgtcccccggtggtccttaccgggaagacaagccgcctccggaagcgcctgaagccctcgggggcgtcgggcgggcagatacctaccccgaagtgggaaaaggtctcacggagcgccctgaggtcttcctcgccgttctcgtcctcgcccgttatcccctcggcgggatcgtagggaaggagggagcgggcgaaggcctcgttgccgcgtaagatcgcctgtcgtgcctcgtgccgtccggcctcttccgtgccccgttcctcctccacctcgatgccatacttgcgggccagcagccgcacggcctcctcgaagccgcatccctccatgtggcgcacgaggcgtatggggtccgccgcctcgccgcaactgaagcattttccgatattgagcgccgggctgatccggaacgaggggtgacgctcgtcgtggaaagggcagagcgccacgagacccttgccggaacgccgtagcgtgaggtacccggccgctacctcgtcgatgcgggcggtttcccgtacccgcagtaaagtgtcatgcgtgatcatccgaacaggtctttatccagctccgctttcgccggtctgcggtcgttcggcaccggcgtgcggtcatcggtgaaccgggttacccccttgttgtggcagaaacgcacctccccggactccccgtgccggttcttggcgatcgagagggtaccccggccctcggtggagagacgggtctccgggtcctcgtcgatgttcatcacggagaggcggcggaggaagaataccgtatcggcgtcttgctcgatggagccggagtcacgcaggtcggacagcatgttcttcagcgtgggtctcgcctcgcaattccggttcagctggctcagcagcacgacggggatgtcgttctccttggcgatcagcttcagttgccgtgtgatggccgatatctggtcgttcgtgctcttgcggtcctcggaaggcgagagcatcagttggaggtagtccacgatcaccatctcgcaccgcccctgcttccgccggagcgagatctggtaacgcaggtcggccacgctcaggtccgtgcgctcgtcgatccatatcggcagtcgctccagctcgtcggaggccctttgtatcctcttcatctcgggggcggagagggtccctttcaggatcttggagggctctatgtccgctatgcatcccagcagcctgaacaccagctgctccttcgacatctctaggctgtagaggcagaccgggtgcccgttcctcgccgcgttcagcgccatgaagagggcgaaggccgtcttgcctacccgggggcgtgcggcgatcacgttgagcgtgcccggcatcatgccgcccgtcatccggtccaatccctccaggccggtatgtatgcccggcgtgcgtccttccgtcaccctgcgttgtatctccagcatgcgctccttggccagcagggtggcttccttcatgcctacgctgttcgtggcgtgcgagagccgttccatcagccggcccacgtgcgagtccatctccttcagcaaggcctccgtgtcacggtccggccgtgaggctttcaaggccgagtcgtagcagctcagcatgaactgcctcgctacgtaggcctcccgcaggtgccgtgcgtgggtaggcatgtactcgtcgccggtttccagataccgtccgcccagcgccagctggtacaggtcggtggccagcgtctccttatcgggcgctatcctccgcagctccttctccacggagagagcgtcggcgctctccccccggttgtagatgttcaggtacgcctcgaaagccagcgccacttgcggtagcgtgaacatctccggcagcagttgcgccgccagcgtgggcatatgccggtgggaggccataagccccgataagatcgctttctcgatctcctgctcctgcgggagggcgaggccgtcgggcagtgtcgccgctcggtcgctcttgtttttgcttgtgtttgccatgctttactcttgtttttgtttgtcgttatttttctgtatcttctcctccttgatgaagagggacttgtagaagggtaccttgacggcgaggccgtttcctgccttgatcttatggatcatgttttcctcggccagctcgttcagcgctttcctcgccgcgtataaggaacatcccaatgccctggccatggtcgtgatatggatgatgcactgtccttcgtagatagatacccgcttgccgccagcgtatcgatagttgtaaggcttgttggctagtttaccgaaaatgtatatgaacacgccgatcttaaggcgtgtcttgttcttcggatagtaatcttgcagtaataggtcgataaataacctcggaaaacgtgtgtaacctccactttttaactctttgacgctaactgtctgtttcattgtactttgtatttttttgaatggtgaaaataaagaatcgaacctagtttcgaacccccgatcgaatgggggggttaaggattaacaatctgttaaatagtggtttgtcttgaataggtatctatttttcgaatgccctttttaacgtcatttcgcactatataagatataaataggtatttataataaaaataaaagaatagaaaacgaaacgtttccttctttttttgaattaataattatttattttgtatctcattaaatcaacttatttgtatttcctactttctttacaaaggtaaggttatgttttggtttatgcaagcattattattggttaattattttgttttataacatggtataattttttctaatgtaggtttaaatgattaatttgattgtttattatgactagattggggtgggtaatcttttgcttaaaaatgaatttattatctttaaaaaattatgtttgttatagagacggggtatatcccgtctcttattatatgataatgttacttatttaattaaattagattcctcgtcttgatacttttcttgtttggtgaaaagctggtgtatgttccttaacgctttgtatacccttacttttaggctattgagcaaggagccgtcttgacccaccgttccgtaccctgtgacggccctcgccttgcgatcgtgaatgaatacgatcttacctacttctcttagatgcatggctaatgtaccgtcttctcctctttttatatctacccgaatcccgattctccgggccggctctgtatgataggcgaaaacgagccctcttacgcttagttccgggcgcttgaatgatagaaagtatagatagatatcccgtgacaactcgtagaagaacaggtcgagccttgagtgtcgctcatccgggatatagctccatgaggagcagcaggctacgtttcccggaatccgcaaatgatctactaggatctggacgtataggggagggtacatggtatctgcgtcgatattgatatggtacctgcctcgtgcgtggtctagtccgcattggcgggcatatccacaactatgtcgtttttccaaataatgcgggaggcctacgagacggaatatctcaccggtcctatcggatgaatcattgtttacgccgatgatctccacgggatattcgcatctcatctcactcagcgcccataggcaaggcaataaatgcctctcctcattgtaagctatgacggatacggtaaccacgggctcgtcgctttgtaccttcgctagtttttgcttgatttcttgaatgatcccctcctggacgttgtctaggggttgattgtatatggatatgtatttttttgcccatttcatgataattatcgttttaatagcatcttctccaaagaccttacggccttgtatccgaatatcttgatgaataatgtccgtgtacggtagtaggcgaaagccttatgcgaaaaccatgagttttggtaatgatgaatcgcatgggtctcaggggtgaggaatacctctctcgaatcgaataccttaggcgagaagtattccttgggcaagacatagacagcctctcctaggtcttttttcttcagatcgtcgatattgctaccgctgggcatgtttatgacgggctttagacggagtatggtctcgttcaggatctccggtagcatacggatatcataacttccgtcttcacgtatgaaatttcgtccttcataataatccaagcagcatttgatccagtcacaacctttttcggctcctaatatggccgcctcaatcgtaccggaagtttccgccccgacgaaatagggcagctcaagaaagttatcgaggctcttcagtatctccacgtctgagtctaagtagattcctccatggtggtaaagagcgtacaaccggatgtaatcggcggcgaacgcatatttcttggtgttgaacgcttgctctacccatgggacttcgtggatgttaaaacgtttcgtgtcccataaaatgatctcgtagctaggaaggtgttttttccagctatcaaggcagtcttgtattttccgtggatatggatcaccacttaaccaacagagatgtatgattttaggaatcatggcttattctattttttgttttctatatcaatttcacttaatactttactcatttggctctcccacgaaagcgataggacggactccctgatctggcagggagatagcgtttgccccctatgaaattccaggatagcgggaatctcgatcgggctttcatctgctttggctttcagtatataaggctttccctcgaaatcactgtccatctcggagtaaatgaaagggagccctcttgctgcgtactctctgtttttcagtgttttgatgtgggtgatgccgcttctatggcgtgcgaggctccctatgcccatatcggcctgttcgaagagctcatccaattcttccccgtgtctcatcccgtgtaggatcacatatctctctaagttatatttcttgatgagtgggagaatatcgttctcttcccgtttcgccgcgaaattgccgacgatgtggaaatatacattatatccggagtttgcttggtaataattgactaagccttttactaggcggtcgaagccatgccagtaatggatttccgccaccccgatcaagtggagctcatggctcgtgtcgtttatgtgtttctttagcttgatttgtttgaagtctatcccgttcgatatttgtatggtacggctaccgaatattgtttggtaatcggaaaaggtgatgaccccgcttaaccgcttagctaacgtatggcggaagcatttgtcgataagcagcgttgccttacgggagaaaccgatatattcttgatcataggggtatgtaggtatctccatgaccactttcacgtggtttttacgcatctgccataccatgtggagcgtgaaagggttcgcgttattgtctgagcgcatatagacgaggtcgataccttctttcctgacgtattccactatagaggaatactcgattcttttaaggatcttgccttttatgccagttccgtaatcccgtaaaatctcggagtcgatcatgcgtagtttcctgccagctggttctcgcatgtagcaaagccttgtatccactccgcatgcctgtaaagcgtctacttgatattgtatcttcttgctgatcccgttcgccgggttaaatccatggaatataaggaatagggctttcatctttttatctttgattttaggaagttaattatgttatatacgccactcaattgaatatatatgcaggagatgagaacggcaataaccgcttttatgaacaagtttgccagctccggtaatataatggatgattggtggatagaccataggcatactatcaatatacccacgagcggagccggggaaataagttgtctgattaaagacgctaggctgcgttttagcgtcactttatacatccatacataacattgtatgaaattgatggcgaaggtcgcacatatacaccatgcgacagcttcgaggctcttgaatatgaatatgccagcgaggatgcctgatacgttcaatagggctgagaatacgccacatatgaacaggcttttcgtatcgttggctgcttggtagatggagccggaggtggacaggatgatctgtatgcctacggataaggataggatctgaaatacgggaacggatggcagccattggtctccgaataggatgagcgtaatctccttggcgcaaaaccataataatactgataatgggaacccgatgaatgctaggatgcggatgactttctcgtaggagagggctaatttaagcggatcatcttgaaaattggagaagacgggatgcatgactggtgatatgacatgtgttatgttttgcaacgggagcatcatcaagcggtacgacttctcgtaatatcctaaggaattcatactcatatactttcctattaataatttatcaaggtttctgctgaagtaatttatcacattaaacatgaattgatatgcggaataactgaatatctcatgaatggattttgatccaaatgtgtattttaatttctggggcttttttcttatggaaataatgaatataaggatgcttgagaatataggattgataattaaggcatataatccagctcctgatatagctgctaagattgctatgattcctccaatgcattgaacaaataaactcctgtatgctataaatttaaattctttgtccttgaataatagtgcgtttggaacgatgttggctgaggcaaagaataagttgaaagataataaatgacatatggatagcaatgaactctgtttgtaaaataaggagattggccatgatgacaagaagaataaaatggagatccctatcccggtccatagtgtaaaagagaatatatcgttaagtttatcctctgttaaatgcttgttttgaatgatagctggagcgatccctaaatcactgaaaatactgaaaaatgaaatgatgacggtggcgatcgctacgaccccgaattcctctggatcgatcagccgggccagtacacctgccacggctaaagaaatgatgattcctgagtattttgatatagctgtatagattattccagatgccaactctttttgtattgatgccatatttttctagtagaggtgtattattctcctaataggcaaatatatgttttttatttaaattattcatgaggtgttccttattttcgataaaaatacatacctttacattaaaacaataaaattaaatgagagtcctatttgtctataaagagaaaaatggggataatttatttgttcccgtgattcgaacgaggctttctgttcatggaatagaggctatcagctcagttgatgagttttggaatccatcccggtcttatgatatcatccacattcattggcctgaggaagtggtgggatggaatgtgaatgacgtggatatcgataagcggctggagacccggctgagatattttaaggagaagggctctcgggtttattatacgtgccacaacttatcccctcattatggaagtcctttgcatcaagcttgctatagagtggtagagagaatggctgattgcatggtacacctcggtaactatagtctaggcaagatggccggtctatatcctgattgtaggcatgtcctaattcctcatccgatttatctgggcgcttatgacgatactctgacgagagaggcggcaagagaatattggggcattgaccggaggacttttgtggttacggcgtttggcaaattccggaggagagatgaggtctggatgacgttgaaagcttttttctctttgcctcgaaggaagaagctcttgctggccccaagaatgcttccggggagttatccgaagcctttattgtccgtaatacgttgtttattacatcttttaggggtacgaacggagaataatgagcggattatatcagatgaggatttaccgtattattttgcggtgtctgatgttgtctttatacagcgttgcgttatccttaattccggagtagttccgatggctttcttgttcgggcggggtgtcgttggccctgatagcgggaatgtgggtgaattactgagggtgacagcgaacttggtcttttccccctcggatcaagggtctgtcaattcaatgcttcgctctgccatgaatatggatttggacgatttaggagctaagaaccggaggtatgccgacaagtatcttcatcccgataagatagccggtctttatgcgaaatgttatcattttgaggaatcgcattgatcccttttatcgggttcgtttccattgctgtccgcatgggtcataatgtttgacaactttagcaggattgcctacggccacagagtaatctggtatatcttttgtgacgacactgcccgcgccgatcacgcagtgcttgccgatatgtacgcctgaggtaatgaccgtgttcgctcctatccaagtctcatcttctatgatcacaggggaggtagttatgccttgttttacgattggtttagaaatatcatggtatgtatggttgagcccggatatagtgatgttctgagccaagataacttgattcccaataaaaacgggaccgatgatcgtattatgtatgcctatgcgtgaatgatcaccgatgtgtacgtggcctaccccgttgtctatcgtgacgtaatgctcaattatactttcctgtccaagtatgaatgagttaatgggactgacattcattatagcagatcttctgatcttgctccgttttccataggttaacataaatggattgacaaaccatttaacccataatctagggcaagagcctctttgattcattattaagtaatgaaccgttctctttaatctgtcatttttctttatcttttgtttaagatcgctgatattcatttctttaaggattgaatgacttccatataaacttgcaatagtttcctagccgtatgattccatgagaataatcgggatctttgtaatccatattttatttgttcatcatggaatgcttgatcttcttctagccgcagcaataaggaagctacttcttcttcgttgaaaggatctgccaataatcctccctttccggcgatctcaggcatggccgaggtattccccgttatcacgggtgtaccgcatgccatagcttctagcatggggataccgaagctttcccttagggaggtgtataggaagacgaaggccccattgtacaagtatgccaaatccttgttggagatgtaacctgggtaagacaggtaaggcttgatttcctctatatgctgctctctcaatatcatatccagcttgtcttcgcgtaagtccgctattaatagaggacgctttcttgatgagcgcttgagatacagactgtatgccttcaaggtgcggggtacatttttcttagggtccgtatttcctaggaagaaaaggtaatcgtccgaatgaatgtatttatgggtgatggcggatatgcctgataggggatgaaaatgctggctgtatccattgtagatcgccatgatttgttctttgggcagacataaggcctctcgaatccgatcacgttcaaaatgagatacggtaatgattctcttacacttagggagtatacggggaactactaaacgtcggtagtgccaacccatgttttggtaccatgatgtattacctccctgcttgggctcaaggaagatgatgtcgtgcaaggtcaataccaatgggacggggcaatgaatcggagccgtgttactcgtacaatgcaataggtctggccttatcttggctacagcccgtggcaacgccacctgctcccaaagggggtaggtggggcattttacctccacgatgtgcgtattgcttgtttcttctaggcaatgatcttctcccggacttacgaatatgaaatattcattttccttgtcgattttctgtagctctcgaatgctctcgagcgctacaaaatccatcccgtgcttattcgtacggaaaattcgctgggcttcaatggctatcttcatgatttggagaatgtttggtgtgagagaatgtatgctttttccctattcggaacgtgtttaggaacatgaggaagaataggatgggaacactggcgatcgccttcctgaatttttggtccactaaatagtctggaaccgctacgctaaaagtgatgcctagccatatcaagaggaaccaccatttaatggagattatgatatcaagtggacttaggatggcggcaattaacgtgataaaccctagcaataagacacgagggggcatcatccattgaaataatttatcgcaatagtcccaatttccttttattagtgctcccggtatctggagaatccctgagagtaagttgtggaattgtgtggcaagccagcgctgtctttgattatagaagtctttcttgcctcttactttctcgtcgtatgtatagacatcttcaagatattcgatatatatattttggagtaacagttttcgctccatgtacttatcttccccgatatcgttgcaaccttgtatgatattcttgaaaagaccgtattcgaaagccatacccgagccacttaaggcggacgagaaacctaggcgggtatgtcctttcctgaaaatagagttgttgatctcctcgctaacggcgtcgagcaccgctatgctgctatctctgttcttggctaccctatgcgtctgtatggctgaacaacctgcataaatagcatcgtttattttctctatataattgttttttacgatattatcggcgtcaaggataatcacgttgtcatattttgtttttccttcttcaatgtaacggatggctgccttgagggcctctattttggtactttgtgggttctccatttttataatctttacggataatgactttagcctatcgagggtttcctgacgcatttggttggctatcacgataatatcatataattctcttggatagtcttgctgaaggaaacttttgacggagtctataattacctcatcctccccataggccggaaataaggccgcaaaacggtattttttcatagtcgtagggtatttataagtcgatttccttttagagtaaacggcgaatacgaataaatacagtacgcataccataaaacataggaatacgatggcgtctatcaattgaaatagatactcctccttgtctatccaattttctcctatttgaaagaattgctcaatcatggtgttttatatttgaatcagttgattttttttcttgtatttcttgatctagatagggtcctaccattataaaagtaagtcccgtaaaggaaattaccattgtcgggaattgtccccagaaagagttcccgtatgcattgataaacattccgaatatgccacaaagtaaccctgtcagtagccctttcagctccggatctctgagccgcatggctatgatccatcctccccatccaatggatagaaagatcatgcttaggtaaagtgtcaagccaaccgctcctgtctccacccagattttgacataccatgaatctgttggaatggaggtggtaaagcgttttgatattctctctccagccctgtcacctgataatcccagcccttctccaaaaggcttgtatttcatgtaggatgccaatttcttttgattttcttttcgaacattgaatgaggcgtcttctgtcggggtgaatgcggtacgcatccttcggatggtagcgttgctatttcctatagtagtaagggcaaaaaaaacataagtaagcaataataaggtcgagcttgtgataatggttttggtttgtttactgacgaatgtataaagtgccaatcctgctaatggaacgatcatggcccctcttgtaccggaaaggaacatcgcgtaaatggctaggatagctatgcttaaataatatattctacataaataggagcgcatgtggaatgctgcgatcccaaagaacatagtggcggctcccatattcgcccccatattgctagcgtcggtgaaaaaagagaaatagcggactccggaccatatgatatgagtcgtagctcccccttcattaagccatttggtctcgaaactgtcaaatccaatatatttttgcatgaaggttttagttatagctaaaagggtgaatagggataaacaaaatatcaaggattttaaaaaagagtaacgagtgcataataacgatgtaataataacaatgataaacccattgaatatcagtcctcttgataatatccaagcctcaagtactccggaggggttagcgatttcaaagatacaatatcccatccatatacagcacatgacgcttaaggggtgaattgctcttttccattcgatgttctgataaagggccgcatgaatggatagtaatactaaggctgttacgtataggatatccatgattacgctaacgccttctattggaatatatcgggtaatacccaatatgaaatagttgatcgtaaaaatgacaaatagtatgaaccaaggatatttcaataataggatacaggttatacataacaaaggcaaagctattatcatcccgaaaagagggatgttattaaatagtaaagctcctcctattcctactagtcctatgacaaggattaatagggtcatattgaaagaagaatcctcttttatctctcttgaagtatccatgagcttcgctattttatggccgaattggttgcggttaaccccatatacatcatacggttcgtgaaagagcgcatggaggtctgagggggcaattgcccggtgaaatcttctacggcttctcgtgaggcgttattcaagtataaatacaaagatgtatttttagttatctcacgcaaataactaacaaattccttatcgctatttttccatactctgcgtacattagctattagaatattaacttgacttgagcttagcaaatgtggaggcacactgtttccttgaatggaaggatattcgattaatacaatgtctggttgactttcggctttaatatactcttctatattttctgtggtgaatagtgacgattcaatgtttatctcttctccgatccttatatatcgtacttggaaacctagctcttcccaacgttcttgaaaatatttggcaacgaatgtcttcccttctctttcttctatacttaatatatttatgtatagagtcttatttttttgcaaataaggagccaaccgattgcaagcgtatgcggctgatattcggttacaggtctttacaaatcccctgtatttcaattgggagttgcgtccgttgaaggctcctaatatattcattcctgtgaggcgtttagcccgttctgcatcccggagggtacggtctagtaattcaatgaccaaatttagggctataatgaaaattaaactaccgataaaagcggctatgactaaaaacatgcgcttacctttgtcactaaacaatggataagcggcctctgagatagttgttaagtttgatgaggttaattgtaagttcacctgtttcatcttagccatatttaaggcatggagaacttgtagataagactgttcagtgacattgatctctcgttcttgctggttgatcttagtcccaatgggagaataattcttatactgctcctcgaaatcgtgctttcttttgtttaaaatctctaagtctgccttggatttcacttgtatcaaggtctgtgacaaccattcttgtactaatccgtcaatagcgactccttctttactttctttatagctattaattttatctgtcagtaatgctattctcttctcgacatctttcagttgatcttgatatcgtgttaattctgtatccttgtttaatgcgttttcagaggtgaaagtctctatctcggtgattttaccactgatgcgggaaacatcttccaatgcgttgataaactcttcattcgttttgacaagtttagtacgaacttccatatatttctctaactcgttgatgattttggttgagctctcgtaacttcgttgtgtttcttcgtaacggttctcaaaatcagcaaaagagtttgcgatagattttgtttgttctgtataatttatgacgctgttttgtacgttataatttgtaagatcattttcttgttgattgagttttgtccttaatttattcaattcctgctcataatattttacgatatcatttgctgttttatattttaaattatcgtaagaatatttcatttcttcgctgactaacttaaccgtattccatgtgattccgggatctgagctagtgtaggctatctctatcaaatcgctattaccttggcgtctaataattatgctggataaagctgcgtagctatagaatgcagctcctccgttgagcaattcatgcaaataattgcggctatcactgtttttatattctttaaatctgtttatagtgttatcgagagaagccgtgtctattaaatttattatttcttcaggtatagatgctgttaatttcttgtaattgtcagctgttatatagagattatctatttcaggatttccttgtgttaggtttaatgctaataattttagtgatacgttttctagggttcctcttgattttgttaaattaaccaagttatcatatgtgttgtttactgcctgccaatcaggttttgtctcttcatctaaacccgtgttggaggtaatacctgtgtagatcgaagttgtcacggtgtattttttctccatgaattgactgaaataggcaaccaatgctgttacaataagcgttccaaatatcagttggtgacgaattctatataaaaaacgggatatgtatagtgtaatatccataaattatcgatttatgatttttacatttgtaagcatctctaatagggttaccgcattgtgtaaggtagctctaccctcttgataagagattacggctccagaacgacgtcctctttccatggccaaagtcgtaatgtcaattttaccgttgatgaagtcttgttccgatattttcatttgggcgttgtaaagggcagcagcgtctgatttagctttcaaagtagctaaagcttgcaatacgttattataagcttccaatatttttaatttccgttcttctattgagatctcatattcataatctaattgccggaaacgagctttccgagctcgtaccttttggccacggctaaataggtcaccaaatgggatagacaccgatatgcctgcgctataagtatgttgattactacccagacttgtgagatattcaggatattctacggtttcatgagaggatagctgcactaatcgtccatattggtactgtccgtataccctgaaataatctagccattctcttttggtcactttcatttcagcattagcttcatctttcttagcttcgtaaatcttgatcgaagggtgatcatatactgattctaaaaaaacagataaaggtggtaattggatacgttcataatcatctagcatcgcttgaatagagtctgagccagatgttacttccacggttgtagctttatcgaaataggttttctttttctgagctatagccgaaaggatactgaatatgaataggatgataaataagttcttcatacgatttattaatggatctatacgtcctctttctgtacgaacgccgtaaaggtcttaatgatgatcttcatgtccagccagaaagaaaatgtatgagcgtatttaatatctaattgtttacgttcctcggcggacatactaccagaattgccacgtttctctacttgccagaggcctgtaaggccggcaggagccatgaagcgttgtatgtattcgtcactggtcagtagctcagcctcgtatatgggaagagggcggttaccaactattgacatgtctccttttaatatattgaatagctgggggagttcgtcaatgctgtatttccggataatatggccgatctttgttatacggggatcattctctaatttgatgaaagcgttggaacgttcgtgacgttttacttttaaatagtcgttttcaggagtagcgtcattatcagaatataaaatgatattttgtttattctctttaaaaaaagaggtcgcattctgtgaattcacagaagttgctgaagaggctacagcctcttcagcaatagattccgtatactgattaagctttttatactctgttatgcgcttgtccgcgtccatatacatagagcggaacttataaaaatcgaaaaccttatagttgctgcctactcgtttcgacttgtagaaagcggggcctttgtcctccagcttgatccaaatcaccgtgatgataaagataggggagaggcagaggagcgccatggatgagaaaatgatgtcgaagacccttttccataaaggcagcttgaaaatggcgagatcaggctcttttatttgaggcttacgcgctttttccattctcttgcatttctcggcgatacccagtagcttcactaaatcttccttagaggtagactcggagatgacacagtccgttccggcttgcaaataggatattttctcctcccgggtcatttccggggcgattaatacgatatagatattttgaaacgtcttatgcaaatgcgtgatcgcaggaatgtttaacgtaggatctgttttctcgatgaatacacaataatccatttcctcggcaggaagaagcgtgtttctcatctgcagaagcgttatacattctatgaccccggtgcctaatgccttacgtaaacgttcggccaacggcacgttattaccgaaaaagacataattcattatcttaatattcgttttacccttacccttaattcctccggattgaaaggcttcaagataaagtcttccgccccttcctcaaacaaacgtattctatttgagctgctctctacgctcgataggatcaagaccggtatatggctgaacatatcgttcgcttttaaataaaccaagaattcctctccggacatttctggcatattcaagtcagagatgatcaaatccggtaaattgccttcttgaagccaagcgatcgctttcaaaggattttctttataggataccttgtaagtacttgataaataaagcatgattatctttgcgatttcttgcttgtcatccactaaaagaacagatttctccatagagtcgtataatattgtcgtcttttgttttatctattatgcaaatttaggatattaaattgaaaaaatctatgtttttcaattgttttttttgaaaaaacagttcggactttgaaaataggggaaactgcgattttttgattaagtttgtacgcacataaatgagatgagtattcgaagatgcgttggaggaaatatatagattttgatgttattcatttattggttggcgctattgtcgggatgggcttgtcctcttgccagccggagatgccggtgatctctacgataaccgtggaggcggatggcctgacggttcccgtgaacccggatctgtatggtttgaccattgaggagatcaaccacgggatcgatggggggctgtacgccgagctgatccagaaccggagcttcgaggatggcgtgccacccttgaactgcccttacgacgccgcccggaacgtcttgattaccccgaatggatggacgatccctttcatgcggggagattccgtaccgggatggaggcggatcgtccctaatacacagatatacccggatatgaaggagctggtgaatgataagaaccggcggtcgttgctcgtggccgtatcgacttccggggagtcggggcgcggaggcgtgatagccgagggataccgggggataccgatccggaaaggggaacgatacgatctatcgtttttcgccaagggggcgaatatggtgccccgtaccatccgggtggccttggaggactcgatggctaatacggtcttgagcgatgtgtttcaggtagcgccgctatacgagtggaaacgatacaggcatacgtttacggctacggaggacgcgccgaacgcggtcttgacgatcacggccgatacctccgccgtgttttggctggatgtggtatccctcttcccggaggatacgtggaagggacggaagaacgggctgagaccggacttggcggcgctggtcgattccttggcccctcgttttatccgtttccccggaggcagtttcgtggaggggtatacggcgggtacgtaccctatctggagggagacgctgggcgatatctcggagcgtaagcatttctggaacgtatgggcctatggtacgacgaacggcatgggctaccacgagtacttgcaaatgtgcgaggatatgggggcggagcctatctacgttattaatagcgggatcacgagccaaagccgccggccccgctacgaggatatcacggcgatggataagctcacgggagatgccttggacgctatcgcctacgcgaacgccccggcggattccctgccgggcgccctgcgtgcgaggaacgggcatccggaacctttcaacttgaagtatgtcgagatcggcagcgagaactatggcggggagtatttcaggcgctttgagcttttccgcaaggcgatcaaggaggcctatccggagattaccgttatcagcagttcgcccctcacgaagcgaggccgtagcgagtgggtggattcccattattacgccggggagcatttcttcctctcgaacgccagcaggtttaatagcgaccggtattcccgacgttcgccggcggtgtttatcggggagtttgggacgacggagcggcccttggccggtacgctccgggcggcggtggccgaggcctgtttcttggtcggggcggaggagaacccggatatggtacgccgcttggcgtatgccccggtattgggcaacgccgggttcgagaaccagcgccatccgttgatctctttcaacacccatcaggcggtggtctctccttcctaccatttattaaagatgtttacccgccatcggggggatgaggtgctgaagacgatcgtggatacctacgagaagccacaggtacgtacgggccgggcgggcgtggagatgtttgataatagctatgagttcaaggacgtgcggatcgacggcgtgcccgtatcggatatatccgtgatgagcgggggatggagggtcccggaggctggtacgttggtgccggaggccaaccggtggaaccaggtattgttcggcgactctacgagctacgcctatgaatatacggctaccgtccggcgtacgaaaggtagcgggcagatacagcttcgcctccgcgacaacgggtggacgggcgagcaggcggattatatcgccctgacgatcggggcgggaacgagcgagctgtaccatcaggtaggtggcgtgaaggatagcttggtctctcccgtgcgcttcccttttgagagtaaccggtggtatacggttcgcatgacgtgcgagtacgagcgtgtccgttgctatgtggacggcgtattgctgcatgaggtggatatgcgcccgatcccgtcgttggtatccgtcgctaccctcgacaaggagaaccgggtgatttacttgaaggtcgtgaatacgacccgccacgaggagaagacctctttgcgtatcgagggagtgaatatccgtaacgaggcggagctgatccaattgagaggggagccggaggctcgtaatacgtttgagaacccgggggccgtaacgcctgtcaccgagcctatcgtattcccgatgagcggcccgctaatctataatttcccgcctaattcagtgacgatcttgaaattatacatggagtaggtcagatagggcaggagggccggtacactttatctgtatttatcctaacttcgcggcgactttaacaaaaaaaatgtgttatggaaccaatgcataagataaacaaggtagagctccggagcttgcagcttgaggactatacgcagttgtcgcaatctttcaagagggtgtacgccgacaaggatgttttctggacccgcaagcagatcgagacgttgatacggatatttcccgagggacaggtcgtgacgctggtggatgaccggatcgtaggatgcgccctctccatcatcgtggattatgacatggtgaaaggggatcatacctacgccaaggtaacgggcaacgagacgttcagcacgcataacccgaacgggaatatattatatggtatagaggtgttcatccatccggactaccggggcctccggctggcccgccgtatgtacgagtaccggaaggagctgtgcgagaagttgaacctgaaggcgatcatgttcggcggacgtatcccgaactattataaatacgccgatcatatgcgtccgaaggaatacatcgagaaggtgcgctcacgccagatctacgacccggtgctcaccttccagctctccaacgatttccacgtgcggaaagtgatgatgaactacttgccgaacgacgaggagtcgaagcattgcgctaccctgctgcaatgggataatatctattaccagccgcctacgacggattacgtggataagaagacaaccgtgcgtgtcggtctggtacaatggcagatgcggccttataagacactggacgacgtgttcgagcaggtggagttcttcgtcgacgccgtgtccgattacaagagcgacttcgtccttttccccgagtatttcaacgctccgctgatggccaagttcaaccatctgggcgaggcgcagagcatccgtgggctggcccagtacaccgaggagatccgtgagcgattcgtgaacctcgccatcagttacaatatcaatatcatcaccggtagcatgcctttgctgaaggaggacggggcgctatataacgtgggatacctgatccgtcgtgacggctcctacgagatgtacgagaaggtacatgtcaccccggacgagcagaagagctggggactctcgggcgggaagatggtgaagacgtttgatacggattgcgcccggatcggcgtgctgatctgttatgacgtggaattcccggagctttcccgtatcatggccgaccaagggatgcagatcctcttcgtgcctttccttacggatacgcagaacggttactctcgggttcgtgtatgtgcccaagcccgggcgatcgagaacgagtgcttcgtggtgatagcgggcagcgtgggcaacctgcctcgtgtgcataatatggatatacagtacgcccagtcgggtgtgttcacgccttgcgatttcgctttccctaccgatggcaagcgtgcggaggcaaccccgaatacggagatgatccttgtatcggacgtggatcttgatttgctcaacgagttgcatacgtatggtagcgtgcgtaaccttcgggaccgtcgccacgacttgtatgagttgagggtaaaaaaacagtagtgtttgcggttgaacacaatagtattcatggttgaacacagtagtgttcgctattaaacacaattatattcgccggaagaatgcagtaggggcgggatctgtccgcctcccgtgccgtgtatgcgtgggagggcggacgaatcccgcccctgcggtttatatcggggggaggatcgctcgcttccccccttcggaaatgatcttaatgacttagcatctcagccgtgatcggcgtgaatttctcggcatccgatttacggagttgtacgctaccgtcgttccagttggaaggccaacctccgatgatgtgtccgaggaataccagcttgatctcgtgcaagccttttgccaaggccgcggaggtgtcatgacgggagaagcgttttacctcgccaccgttattgaccatcaacttgccgtcgatccatacctcctctaaatccgaagagatgtaataaacgccatcctccgggatattcacgtagccggtagcgatagcggcgtattgcttcacgcctcgcatggattcgggggcgggcacttggttggtcagctcacgggtcgtcttgatgacctgtttcttaccggtcttctgagcggcctccagattatttacgcttaggtacatgccatcgaatacctccatgtcgaggcccggggtcgtcttggctacctccttggcgggagccagcgtttgtttctccacgaggatcgtgcggggcttacccatcttgccggaaggcaacacggaagcgatcttcacggtcgtagtctcggtgatgtcgaaaggagccgtatatacggtagattccggggtaggctcggtgccatccagcgtgtagaccatcttcatcggacggttcgtggtgaatgtcatggtagccttgtccgtgaaagccacgaagttgcaagaaccgttcggttgctcgggctgcgggatgtagtagttgataccgtgtccgtctaggcgaacctgagcgttgtccagacggcgttcgaagtccttgtaatccttccggtccagcgggctccaagcgatctcggagagggctaggatacgaggatagatacggtactccatgatgtccgtgttataaaggtactcactccatacgttgcattgcacgcccttgatgaaatgtcctttaccggccgctgccagcgtgtcggggacggggttgtatttatagacccgctccgccgtggtgaatcctccgatagataccgggttgatcttgtagtcgccttggaactggtcgatatacataccctcgcttcccggggtcatgatcacgtcgtggttcatgctagcggcggcgataccgccttcctcacctcgccaagacattaccgtggccgatggagccagacctccctcaaggatctcgtcccatccgatcatcttcttgccgtgcttgtttacgaccttctccatgcgttgtacgaaatagctctgcaatttctcctcggccgtatgctccttgtcgcctttcaagccttccttacggatacgggcctgacaaagcgggcatttctcccagctcgtcttcgggcactcatcgcctccgatatggaaatactcgcccgggaataggggggctacctcggcgatcacgtcctcgaagaactggaagggctcttccttgccagcgcataatacgatgtcttccacgccccagatgatacggggagtaccctgcttaccctcgcaagacagctccggataggcggcgatagcggccatctcgtgtcccggaagctctatctcgggaacgatcgtgatgaaacgatccgccgcgtatttaacgatatccttcacctcctcttgagtatagaagcctccgtactcggtaccctcgccatcgatgcgcttagagccgatctcggtcagtttcgggtacttcttgatctcgatacgccatccttggtcgtcggtcaggtgccaatgcatgcggttgatcttgaacaaggccaatacatccagctgcttcttgatattctctaccgggatgaaatggcggcaggggtcgagcatgataccgcggtagccgaatcgaggctcgtccttgatagatacggccggagcggtccatgcgatacctttcacggcggaaggactctcgatctcggcgggcagcaattgcaagaacgattgcataccgtagaaaagaccttgaggggtcttggctttgatacgaacgccgctgttggctacgtcgagcgtgtatccctcgtcgtttacgtccagagagccgtcgataaccaacgagataccgtcggaggtctctttgtcggcggtagctatctggtagcctgtcgccgtgttcattttagccgcgaagaactcggctacggttttcgcctccggggtggaagcgtagatcctcgtgtttttgtttagcttgaagtttccttcgttctgcgtaaggctgaccggtgtcgggatgatgttgataccttggttgtaagctttcgctttaccgggagcatcatcacatgaggccatcaggcccaagacagcgccggcgcagattgtagcaaggagctttttcatagaattaaaaattgaaagttgaaaattgaatattgtttagatgtttttgagagtttaaaaagagaattgagagttgaagataagatgccgtttggcatccttttcaattctcaattctcaatttcctatttaccatgcgaagataggatattccttcatgataccgttcaccttctcacgaacggcaccgatggtcttatcgcattcgggagcggccaatacggtgtcgatcagttccacgatctcgcccataagcggctctttagcgccacgggtcgtgatagcgggcgtacccacacggataccggaggtctggaaggccgagcggctgtcgaacggaaccatgttcttgttcaccgtgatgtcggcggctaccaaggctttctcggccactttaccggtcaggtcggggaacttcgtgcgcaggtcgatcagcatgctgtggttgtccgtaccgccggagatgatcttgtaccctttgtccgtgaaggccttggccatagcggcggcgttcgctttcacctgtgcttggtacgtcttgtattccggctccaaagcctctccgaaggctacggccttggctgcgatcacatgctccagcggaccgccttggatacccgggaatacggcggagtccaacaactgagacatcttcttgatctcgcctttcggtgtcttcttgccccaaggattctcgaaatccttacccagcaggatgataccgccacgaggaccccgcagggtcttatgcgtcgtagacgttacgatgtgagcgtactccagcgggttgttcagcaaaccggcggcgatcaggcctgccgggtgagccatatcgatcatcaataaggcgcctaccttgtcggctatctcacgcatacgtttgtaatcccagtcacgggaataagcggaaccgccgccaacgatcaatttcggtttctcacgaagggctacttcctccatctggtcgtagtccacccgtccggtatcttcctttacattatattcggtagcgtgatagagaacgccggagctatttactggtgaaccgtgggacaggtgtccgccatgcgacaggttcaacccgaggaacgtgtcgcccggattcaatacggcgaagaatacggctgcgttggcctgcgccccggagtgaggctgcacgttggcccattcggcgttgaatagctttttcaaccgttcgatagcgatcgtttcactttggtctactacctcgcaacccccataataacgcttgccgggatatccctcggcgtatttgttggtcagacagcttcccatggcctgcatgacctggtcgctgacaaagttctcggaagcgatcaactcaatgcctttcaattggcgttggtgctccttctcgataatgtcaaaaatgatgttgtctcttttcattacctcttaaattggttattgcaatgatatgttcctcattgaaaaggaatcctcgcgaatgtactatattattttaatactatttaaaagattccgtttaattattacagatgcgccggaaatggctccgcttaccacttggtgagggttacgtttctgaactcaacctccttaccctcgctctgtagcccgatatggccttccttcaccttgttggttccggtgttctggtatacgccgttgatgtaaacggtgatgacgccgtctttcacgaagatgttcgcctcgttccactctccggcgggcttctcgctggacgggttcacgttctttacgacagggaagaagggacgttcctctcccgggcgttgctggtactcgacaaggtcggagcctcccagcagtacgaacaatccggccctcccggcttgcaggttgcattcgatactgttcgggaagggattctggaaatctacgatgtgtaagaagataccgctattggcgttggaatccccattcggccaacgccattccacgtgcaatttatagtcgctgtatttctccttggtgtacatatagccgaaaggctggccggtgatgaagatcttaccgtcgcgtacggaatagacctgatcggcggggacggagtttttgtcgactacgaaattccagttagacaggtctttcccgttgaacagtttctcggtcttctgtgcgttcgccccattggagaaacagaagagggaggcggctaatacagccaaagatagcattctttttttcatggcattaaactctatttatagtatgattaatcaacgattagtttgcgatagcgtacccgtttcggctcggcgtcgcccaaggtcttacgtttgtattcctcgtactcggaataggtcccttcgtagaagaccacgttggaatcaccctcgaacgacaggatatgcgtacagatacggtccaagaaccaacggtcgtgagagacaacgacggcgcaaccggcgaagttctccagaccctcctccaaggcacgtagcgtgttcacgtcgatatcgttggttggctcgtcgagcagcaatacgttagcgtccgctttcagcgtcagcgccagatgcaggcggttacgctctcctccggagagtacgccgcatagcttctcttgatccgctcctgcgaaattgaatttagacaggtaagcccgtgcgttcacctccttgccacccatacggatgaattcctgtccgccggatacgacttggtaaacggtctttttcgggtctatatccttatgggtctggtcggcgtaacctacttgtacggtctcgcccacctcgaaggtccccttgtcgatgctttccatgcccatgatcatcttaaataaggtagtcttaccggcaccgttcggcccgatgactcccacgataccattcgggggaagcatgaagttcaaatcatcgaacagcagcttatcgccgaacgccttcgccacgtgctgtgcctcgatcaccttattgcccaagcgagggccgttcgggatgaagatctccagcttagcctcacgctccttctggtcctcgttcaagagggcctcgtacgagttcagacgtgccttacccttggcgtgacgggccttcggcgccatattgatccattccagctcacgctccaaggtcttacggcgcttgctgacttgcttctcttcttgagccatacgcttcgtcttctggtctagccaagaggagtaattacccttccaagggataccctcgccacgatccagctcaaggatccatccggccacgtggtctaggaagtaacggtcgtgcgtgatgcagataacggtaccggcatattgttgcagatgttgctccaaccagtcgatcgactcggcgtccaagtggttggtcggctcatccaacagcaatacgtccggctgctggagcagcaatcggcaaagggccacccgacgacgctcgcctccggacaacgtatccaccacctgatcctccggcggacaacgcaaagcgtccatggcacgttccagacggctgtcgaggttccatgcgtccgtagcgtcgatcttgtcctgcaactccgcctgacggttgatcaaggcatccatcttatccggatcttccagcacctccggatcgccgaatcgctcgttcacctcctcatattccttcaaggtgtccacgatctcctgcacgccttcctgcacgatctccttcacggtcttgcccggctccaacttagggtcctgctccagataccctacggaatacccgggggagaagaccacctctccttgataatccttatcgataccggcgataatcttcagcaacgtagatttaccggaaccattcaatccgatgattccgatcttcgccccatagaaaaaggacagatatatattctttaaaacctgtttttgaggcggaaagatcttgttcacgcctaccatcgagaaaataatcttcttatcgtctgccatataattttttgtgtgttaattggttccttaacttaaaataatggtgtacaaatctacgtaaatatcttttattttacaaatgaacaaagatcataggtatcagatatctaccgattgccaagtttggcgtgtggagattactcggttcaattctcttgtgaaagaagccggtagatatgctattcctcggaagttgagttttagcgttatcataaatgaagggtaggagaggttgtgcggcgttgtggttaggactgtgcgatcatgtggctttaggttgtgtgatcctaacgatttaggattgtggttcgtcttcgtctcgtgaagatatgtaaccggtttatgcatgatgtaatacgtgatgtaaagtgcttatatcttgtttcttgcgtttgctccccatgaaaaaactaaaatttacccctcttgaaatttgtataataaaataaaaccccctatctttgcactcgcattacaaaagtaacgcacaggatgattcgctagctcagctggtagagcacaacacttttaatgttggggtcctgggttcgagccccaggcggatcaccaaaagaaaagccaaaaggcgacaagaaaaagaaaagtcctacaaaatcaatattttgtgggactttttttattgtcttttggcaaccttgaccgccacgaaaaggtcactgacagacaaaaattagtgccttattcgtacccccgacaaaattcttcaaaaaggggtacgaattgtcggaaaatggcgaaatgttgtcgagatttggcgaccctgcatttatctcattatgagttaataaaagtagttttgtaacttaaaaaatgaggtatgaaatcaacattccgagtattgttcttcctgaaacgggacaaggtgaaaaagaacggtaatatgccaatcatggcacgtattaccattgacgggaaattagcccaattcaacactaaacttgaagtcaatcctaaaaactggtctgccaaaaccggaaaggtaaatggcagaggagcggaatttacccgcatgaatgaaatgctggatagcatcaaggctaccttgcacagacactatcagaccattttagaacgggacagctatgtaaccgcagagaaagtacgcaacgtgttcttaggtaaagaggaaaaagcaaaaactctcttacaggtattttcccaacacaatgaacaatatgcgctgaaagtagggaaaacagccacgcaaaagacatatacccgttatgaacttaccaaaaatcgccttgccgaatatatccacgataaatataatgtggaggatattacctttcgggaaataaatgtcgtgtttattgagggcttctacctgtttatccgggagaattacccgtgtacccacaatacagccatgaagtttatacagcgtttcagaactgttgttctgtttgcccacaacttgggactaattacttttaatcctttcggggcatataagctgaaatttgaatatgtggaaagggattttcttgaacaagcagaattagaccggatatatcaaaagacattcgccagcaaacgactggagcaagttcgtgatatatttattttcagttgctacactggactgtcttatgttgatgtctgcgaactaacccctgaaaatataagattgtcctttgacggcaatttgtggataatcaagaaaagacataagacaagcgtaacgtccaatattcgattactggatatacccaaatccattttgcagaaatatgacggaaaactgcccaatggtaaactgttgccagttatcagtaatcagaagatgaatgattacttgaaagagattgcaactgtttgtgggataaataagaaaatcacgttccatgtagcacgccacagctttgcgacccttagcataagttatggcgtacccattgaaagcgtttccaaaatgttgggacacaccaacataagaactacccaaatctacgcaaaaatcatagatactaaacttagcgaggatatggacattttagctaacaagctaaataacagaaaaatatcagtcatataaatactaacttaaaaaaataagattatggacttgcagattatccaaaacaagatttttgaagtcagaggttaccgggtgatgcttgacttgcatttggcagaactctatcaagtggaaacacgagctttgaaacaagcggtcaaacgtaacatagaccgcttccccagtgatttcatgtttgagttgagcaaagacgagtggttaggacttatcacaaattgtgataagttccctgacaatatccgccacacgcccaccccgcctatggctttcaccgaacagggcgtagccatgctttcttcggttctccgttccaaagtagccatagaagtaaacatttcaatcatgcgggctttcgtcctcatgcgccaaatggtaatcggctacgaagaactattaaagcgaatcgaggaactggaggtaagcaccgatgcgcagttcaacgaactgtaccaagcacttacccagcttttaagccagtcgaagcagcagaaagaacgccgtccggtaggtttcgttacctatgagcgttcaggtaacaaataggtaacgattccggtaacgaaatcccaccaaataagctatattccaataaagtatattctttcaccttgcgggcagtccaccgactacccgcattttttatatccttttccaactggcacattccccgaaacgccagccttgcgtggcatggccgacttgttttcgtgaaaagagccgttggaaacccgcacaagagtattgcaagcaagctcacaacacccttgccttttccgcccgcatggagtgttccctaaaagacggaagaggacaggcacttttcccctgtttccctatctgtaaatcttcctcattacgcagtcccccagccgggagagtcgttttaatcatttcaataggcaaaggtagttacgtgttcttcacgattttgcaaggtcgagccgttccggtttggcgaaaaaatcttccctgcctttgaagtgaacccagaaagttggacggttaataaataggattagtggattgagttctaaattgtatggggctcaatcctcctaatcccgttttaattctataattattgtaatagtatatatactcatttagttcgtgaacaaattgttccatattctcaaactcccgcaaatatagtaattcagattttaatagtccgaagaagttctctattactgcattatccaaacagtttccctttcttgacatactctgtactattcctttttttctgagcatctgttgatatgttggatgctgataatgccaaccttgatcagagtgaataattaagtctacgtcatcaggcaagagagtaaaagccttttttaacatatccgtaaccatagataaattgggactttcagttattgtaaaactgataatctctcgattatacaaatccatgatgggagataaatacctttttgaaccaaaaagagagaactcgctgacatctgttacccatttctgattaagagcggtcgtagagaagtcacgttccaatatattaggagccactttaccaactgttcctctataagtattatatttctttcttctgaccatacattttaagtcgcattggttcattagttttagaaccgttttgtgattcaggttatatcctctttggtttagtcccagagtgatacgcctatatccatacctaccatgattctcatgaaatatttgacatatcatttttttctcttcttgatatttatctggaagggaaaatttctgaatgtaataatgatatgtacttttagccatcccggaagctttcaataaaacagaaaacttaaattcatgccttaattcttggatggcggcaaccctttcttgctttctcgggcaatgcgttcctgaactaaggctctcaatttttttaggtatgcgttttctgctttaaggagttctatttccttaagtaaatccttattatcttttggtttaggatctacaaactcttctggttctttaaaaagatcattttcttttgttatcatatcttcagaccatagtcggctacctccatgaagaccggataagcctacattcttatacttacgttgccacattaatacggtacttgggctggggataccatattttaaggcagcttcttgcaaagataaatgattttcaaatacatcttggagtactttatacttaaaatcaacaggatagtatctatgttgcatacgcaatccctcttctccataacgggagtataaagaaacccaatatttgacttgacgtggatttacatcaaacattttacctgttgtacgtaaaggcaaatgctcacacaaaactttggctactacttgtaaccgcacagaataaggatgtttctcgtacttctttcgtttgttagacataatgaaattgatttatatccaactttctgggttcacttcacttgcgaggtattttttgcccaaaaccttgcaaactctaaacactacccttttacgcctatgtgaaacgaaaacgaccgactcgaccggaagacgcataaaaaaaaagtcggatttacgggaaacaggaaaaaagttcagtgaaacttcaactccctcacctctcaaatccgcataaaattaaaaacttcaaaaattacaggaatatggaagcaacgacattatcagaagcaagagtttatgtaggcacttatggcaagtataacaacggttcattgtccggtgcatggctcgacctttcggagtattcggacaaggaggaattttacgaagcctgccgggagctgcacaaggacgaggaagatgcggaatatatgtttcaggattacgagaatatcccggaagccctgatttctgaaagctggatttctgaaaacttctttaccctgcgtgatgcggtggaggatttgaatgacaccgagcaggaagcctttttcgtgtggtgcaactacaaaagccgtgatttggacgaagaagatgcggacgaccttgtacgggactttcaagacgagtatcaagggcaatatgacgatgaagaagatttcgcctatgaaatggtagaggaatgttacgacctgccggagttcgcaaagacctactttgattatgaaaagtttgcccgtgacctgtttatgtgtgattactggtttgatgacggttttgtgttccgtgcggcataacaaccaatccgggcggggtgtcaaagccctgcccgctaaaaacaaccaagtttataaccataaaaaaataagacatcatgcagtcacttaacaaaaacgggtaagcattacccaaacaccgggagaagaaaagttcgtgaaatgctgtttaggggctttcagggaacaggtttattttcaatatgactaccgccacacggacagcgaacttttcagcacggtagccaaaacgctggacgagtgccgccgcaggtgtgacgaatgggtagcgaagaaagaacggggtaataacaagtaaatttcaaggacatgaaaacgacggaagtaaacaaagagcttatcggcagacgttgcgagtgtatttttacgggcttaatggtaacgggcgttatcgaggatatagaggacagcgaacattcggcagcggtcaaagtccgtttcgaccacccgcaccagtggggcgatgatttatataatgatgtgtgggcgtgggggcgcaaaattgacgagttcggcacactgcatcatttgcaactgctggtagataagccggactttcagataatgacggtagttttcggcgagccaatcagccggatagaccgcagtgtttttgaagatgtggacacgtggggtgtctgttccttgcaaggctgggtaaacagctatgaaagtgtccggtttgttgccataaacgaccatacggcggttataacgggcgaatataacatggaacaggtaaaggtgtggttagagaaatacacgtccataaagagccttaaaaccaattgatagagaacggcggctgtttgccgccgccactttctttcatgagtgccggaaaagaaagtagcattatcacaatctttttataatgctacttatcaaaactaaatgattattacaagaacacattttatttatctgaaaatcaatcagacttttaataatattattgtatattgttcattttgattatatggcaatatcgccgaacttaaaaaatcatacacaatgaataattgcaaatccattccacgcagtgagttcttcatttactgcaaaagagcctttgagagtttcaaactgtccacctacatgaccgacaggtatttacgttacatagaatacatatcccaatacatggaggatatgggtgttgattcttacgatttgaatttcagttctgcttttcaagaaaagatagcaaaagctgataattctccaaatcagcgaaaatcaagggagtattcttgtgcgttaagtcttatagacaggttcattcaaggtttgccgtatgccgcacagcgaaaaaaactcaagacatacaatttcccgtccaatgaattgggggattatgcaaacaagtttattgaacacataaaaacaaagaaacgtaagaatgttacattattacgctatcagcattcaatgtcaaatatcgtaaatggcttatccgaaaaaggctgcgattctccctcgcacttaacccgaaccttgataattgatttgattgcttcgcatagaacagccgacaactggtatttctatctcataaaccaattcctgaattatttggcagagcaagatgtcattcctttggtcttggctcatgtaacatatgggaaaaagcctccaataccaaagccgttaccatcatattacacagcggaagaagtaaagaaaatagaaatgtcttttgacaggggtactttgctcggtaaaagaaattatgcgatgattcttttggcttcacgtttagggttaagagcatcggatatatgccagctccaattagatagccttgattggaagaacaatagaatcaaaatcctccaaagcaagacaggaaaagatttggagctaccgttgttggcggatgttggtaatgccattattgattatcttaaacatgcccgtcctaaaacgaaaagcaatatggtgttccttagccaagtagagccgtacagaccgatagccacagccacactttccggtgcggtgagcaaagccattcacagggcggggattgaaacaataggcagacatgtcggtacacatacgctacgccatagccttgccacatcaatgatgaaaaccggaagtagcatacaggctatttccgaaacattggggcattcgggtacaggagctacaatggcataccttaacgtggacattgactctcttatggaatgttcacacgaagtacctccggtagataagtcctattatacacagaaaggaggtgcattctatgtttgaagttaagttgaaatctcactcctcgctctatccctatatgcaggactatatccatgaacgtgaaataaagggaatttgtacgggagaagcaaaaaccatactaagtaattttgaatgctattctgcgagtgttggatatagctgtgaacatatttcacgtgaacattatcataattggattgacagtcttgagggtaatgaagcacacaaatccttgtacatacgtggtgtaatactgtttgcaaagtatttgaatctgagaggtaaaataagttttgtaggtatgcatccaccttacaaaagcgactttacaccttatatttatagtgaagaggaaatagccacactattctcaacggtggacaaatggcgagactatagtatcaatcccggttctatagcccttgtcatgccgacattgttaaggttaatatacagtacaggcatgaggattggcgaggctttaagcattaccaatattgatgtggacttcacaaggcattccatctgtttgagaaaaacaaagaacaaccatgaacgctactgtgcaataactccaacaatggagattgtcataaaagaatatataagatacaggaacatgttaccagtggctggagtcgatgctccacatgctttgttgttttgcaacaatattggtggtaaggtaaatgcaaaagccgtcagagtcagattccataatattctaatcgcttcgggattcaaggttacgccaagtggatatctgccaagaatccatgacctgcggcataccgcatgtgtgcataccatgaaaaagatgatagcggcaggtaaagacatctactgctgtatgccgcaacttgctgtatatatgggacattgtgaccctaaagacacggaatattacttacgtttgacaccgacagcttttcccgaactattggctatggacgcaaagacaactatgccaataactgagatagtgaatctttttttatcaaaacaaaaagtataaagaaaatggatacatataaaaatttcacgaggtctcttgaagcattttttcaacaatacctcatcaaagaacgtggtgcaagccagcaaacggtaagagcatacggagaagcgttcaaggcttatcttgaatataataaaaccttggatatcaaaccgcaaaatataacactgcggaactttacaaggtctcacatatcaagtttcctcaactggatagaggaagaaaagaaaaactctatcagcagcaggaatcaacgtttgtccgcaatgcgttcctttgcctgttttcttattatggacgaccccttgcatatctgtcagtggattgaggtgagacaaatacctgcaaaaaggggagcaacagaaatcgtcaagcacctctctgttgacggtatggctgcaatccttcggcaaatagacacatcaacgcccaccggaagacgaaatcttgcaatgctgtccctactttataattcaggaacaagagtacaggaacttatagacctcacgccaatatgtatcagatttgagaaaccgtattcagttgtggttaaaggaaaaggaaacaagaaacgtttggttcctttggatgagccaataatggaactcctaaagaattatcttgatgaaactgggttgtgtcgtccgggaaaagagagacatcctctttttttcaatgcacaaggtggacaactatctactccgggagttacttacatcataaaaaaatacgcagatatggctcgttttgacaatccccaactgattcccgaaaaagttagtccccatgtttttaggcattccagagcaatgcatctgttacagagtggcgtacagcccatctatatacgtgattttcttggacatgtttctgtccaaacaacagaaatttatgctcgtgtcagcaggaagcaaaaagatgaagccatagccaatgcttatcgggacgtaggaattaagaaccccgaacctaaattatgggaaaaggatgatgaacttcttgattttctaagcaatctttgctcgaaaagatagaacggaaatattatcacaagtgaaattataaagttgtcttagccatatcttgactattaatagattaagacatacgattaatgccacttgtgataatcatttagttttgataagtagcaaagaaacccacaagacttactgtgaaataaacaattatatgtatttttgcaacaaaatccaaatacgtcatgaagtctaagaagaataattttttattaaccagttctgtagtcatcacatcaataggactacttatattcatttggttttgtgctagaggatatttatatgaacaatttataataccaacaggcgtaatttcattggaaaaatcctcgcaatttggagattttataggaggctgttgtggagctttatttgcattagttggagttcttttgttatttgaaactctaaaactacaaagaacagaaatagctgaaagccgatatgtttttaaattacagcaatttgataatatgttttttaacttgctttcgttatataattctattatatcttcaatgcaaggtaaatcgttttttacgcaaaagcaacaatctatatataataatttcaaccaaaatggaggacgtaaagttgctaaaaaagcgtatctaagtttttatgcagagaatgagcccaatattgctcaatattttagggtactgtatcaaatttttagtttaatttcacatagcggactcaatgaagaggacaaagtgaaatatgcgaaaatagcacgagctcagttgtctaaagatgaagtgttctttttgtattataatgctaatactatatatggcagcaaatttcgtgaatatattaacgaatttaatatcacaaagcatttatctatccttgataaacttgaatttaaaaaatattgcagacaacttactgatatagaaaatcatttgttacatgttgctttttttgaaatacgaaaaggactgaaagaatgtattaaacaaaacaaagaatggtataaaacatttttacaaggagccgtagctgttaaatgtactaaaacgaatgcatctaaaatcaaatttattgttataaagacatcaaaagaagtacctgatgatattcagcagggtttgggctttaatgaatttaacatagaacaattcactgcattattttatgattttttaattgatactcttttatactccaatttttttatcaaaaacgataagaatttgattataactccaaacacaatatctgtggatgcaaaaacaactattacttataatatagaaaatagagggaataaagatatagaaatcatataataaacagtcttatacctctataagtctgcttattatatgatatcatttatattttcatatcacattacatatgcctacgactgttatctcacttcgctgtcattattgaacgatagcgaaagttgctgcacctgcccgaagctgtcaattacataaatgtcaatcgtctgctggtctgtcgatgccgaggtgtaatagagcctgaacgtttctttttccagcgggtacaggtcattgggcaggaacaccgtgccgttatccatttccagcttccctttgccgtccggctggaaataccgtatctgataggtagtcggctggtaatagccgccacgcaccagtcggcagcgtatttcggcggtttccccgactttcagccttttgggtactggcagcgtttcgatgctgaacgggtacgcttgctgaatatccaagttgtcattacaggcggtgacaagcacaagggcggccacgatgtagcagcccatgatgattttatacattacattcttcatatacattattatatagcggtcagttgataatgaatttcagtcccaaagatacctgcgagtggaacttgcctatgtccgagccgaacagcgcccgttcccttgcgttcagtagcagagccacccggtcggtcaggtaggcttccagttccagcgtcagcgcaccgccgtacacaaaacagtccttatccagcaaagtagagccgtccggcaagagtttttggcttcggttgcttgtttcatacccggcgagtgccgacagtcccagcgagaggaaaaaggtctttcgtctgtccgaaaggaatttcaggtaatagccgccctctgcggtgaactgttcgactggtattcttatatccttgtagtcatactttttgtgcaggtattccccgccaatcacccagcggttggcgttcttggtgtaaacgctgtacgccgccccgatatggtaggcgaaatccgtgttgtcgttccaatgcatcccgtccgccatgcccgccgtgacctgcaagcctttcatgcccggcaggtatctttgtgcgtgtgcctgaaacgaggtcaggcacagcacaaagagtattccgataaatagaaaccgtttcatccctatttgatttttagttcgttaatcacttctgcgttcacgatgtcggaattttccacccggataacctgatgccgcccaccgttcttctcgtagagttccaccaacagcagcttgtcgtcaggaatggtgaacttcggcagggcgtacactgtgcgcacggtagttttcccggctatctctatcacctcgttgtagctgcgtaccgcatccagcaccgtttcctgaatagccgtgcgcttcggcactttcttatcgactatcttaaacttgatgaagtcggtatcgaaaggcacgttggaactgttctttgtctgcgtgtgtacatagagcatcccgttataggtgtaaattcccttgattaagaactggatgccgaaacgcttgctacccaagtggcgcactttccggtcattgttcttgtagatactctgcagtatcagtttcaccaatagcgggctttcgttacccagttcccggaaatagatgttcatgcgggtatgcgaaaagtcgctggtgtcctcgttctccaagaagtctttcatttcgatgttgagcatttccggttcacgggcatatttggcgttgaatgaaaagaaactgccgtcctcgcaaatgacggagaagttcgtttcgcccggaaagccctctgtcgtggctttcaccctgattacgttctccgcaccgtccgccttgcccgctatgatgtggttgcttcccaaatcaacatagcggacggcggcggggaagatgatgtgtaccgtcttggcaaaggtcacttccacgccgtagggcgttaccatttggcggtacgggagtttccgggtaatcccctgatacaagttgttgccagccgcatacttcacggtgtcagcggtttgtgcgtttgccgcacacacgcccagcaagagggcgaaaaatacaaaaatctgtttcatcgcaaattgaaattttagtggttaaataattattgttgtttggcgtaaagcatgactttatagcctgctttcagttttacttttacagtcctgaactttttcgcaagatagccggacgttccttgcagcaacccccttgtcacgtccatagccacctgctgcccggcactccgtgcaaaggaaatgcttgtacccagcccgcttccgatattcgccatagcttcgttgaacgcttcctgctccatagaggacggcacagataatcccttttgcccgtccgtgtcaaacacggcgagttccaccgggatgatattgcccgcatactcaatcgaggacacctgtatgtcgagccgttcgccctgcacctttgccgtccccgccacaagggtattcttcggcacaacgatgctgcccgcctgcatgggttcgagcagccgtagtttcaccgcctgcccgtccgtcagggtttggtcttggtggatgcaggcggctatcgtgttcctgcccatagcgtagcccgtgcctactgccgtgttgaagccgtagtttcgtggctggctgtaagcccggatgaagtcggcatcgctcatgggctgctgcaatcccgatacggtcgtttcccggatagcctgcaccgggatagccggagtgccgataccgccgccgttctgcccggctgtcggtatttgggcaatctgccccctttgtccgtcctgcccgttcatgtactttgccgccagctcgtaggatttttccaagagtgccatttggtcgtctgccgtaggcgtagcgttctgctgctgttgcagtcggtcggtcagttccgccacctgccgcttcaaatcctctttttcctcgtccaccgccggggtttcgtagaacgtgcttaactggcggttgatgtcccggtaagcgtttgccgaataagaagcaccgccgcccctttggggctgcacatcttcttcctgcatcaggtcgatttccgcttgcggttcttccgcttcatcgtcccccgtgaaaccgaagtcctgcaaggattgtatcttgtcctgctgtttgcggttcagcatcgcttgttcgtaagccttttgcttgtcggctataatcccgtcctctgcgggcaggggtatgtcggcgttgaagccgcccacgctctccatgttcacgtcctctttgccggagggggcgaatatcaggtacatacacccggcaaaggcaaggaacatcagcgggaagactatcatcttcctgcgctgctgtacctgttggggtgtcagttctttttggggcttctttcccttttcaggctgcttgcccggttgcggtacggtcgtgccgttctcatttttctgtacttcttccatattgcggtctgtttaacgggttgatactgtcgctatcgtgtagcgggtattgtttgatgtgttctatttgcaagcgttgcccgtcccgtttcccgatattgtagattgatgaaacggtgatgtagatagacaagccgccaaagaagaagaacatcacgaggataaccgccagccttttgcccggcgtaatccgtccgcacatttggcgcaggcggtcatccgcccaatcctgcaccttttcgatatagtttcgttttctctccataaggctacctcttaatagtttgcaaatccttgttttcggtaatggtaaacgcttcgataatgaagccgtgcgggttgttgtcgctccgtgtggcgttgagcaggcggcacgaagtcacaaggttgcgcaccgtcaggctgctttcccggacaatcaactggcgggcatacgtgttcaccttgtaggggtactggttgaagtcgcatttcacgctgtcaatctccaccgtttgcgtgacgtttccggaaatcacccggttgtagtagcccttttccgccaagtccttgtaatagttgaaagcggtcttgtcggcgaggaacagcgagcgtttgatgttgctttcgatagctcccttgtcgggcgagagcgtgaagaaaagctcgtggaaacgccgcacgtgcgatttggcttccacgggtctgttctgcgccatgtcctgcgagagagccagcatcaggcttttaccgttgtcgaggacgtatatcttctgccgctgtttttcggcgaagctgtacgagttccacacggcaaagcccgtcaccagtgcgcacaggcagatgaataccagcgcaaagagccggatttgccggaaactcgtttcgatgttcgttaatgatttaaattccatatactaaattttgatgttggttatttgagtagttttccggctactttcccggttgccgcacccgtcacagccccggcgattgctcctgcccttgtcacgttgcggctgtaagccgatgtaccgccagcagataccacccagccagccaccgagggaatagtgaagtagcccacgataccgattatcataaagattacatacacggtgctgcttccgtcaggaatgaaattcgggtctgaaagttcctgaatgtccttttgaagcatcagcgtttgtatgcgtgccagcacgctgctgaacaagtccgatacgggcaaccacaggtaaatggagatatagcgtgaaatccactgggtcagcgtgctttggaaaccgtcatagacggaaatcgcaaacgccagcggacccagtatcgaaagcacaatcaggaagaacgtgcgcagcgtgtctataatcagccccgccgcctgaaagagcatttccaacagttccctgaaccagtcccggacggacttcttgatattgtacgccgccctgtccatgtacatacccgtcatagtcaccatgtcggagggcgaccagcccagttcttccagttgtctgtcaaattcctcgtccgatgcgaggtaagccgtttcggggcttcgcatcagggcttcatattccagtcggtctttctgcgcccggtactcgttcatgtcgaaagtctgcgtttccataagctggttgcaccctttcaccactggcgacagcaccgtgttgatagtccccagcacgaacgtgggaaagaacatgatgcacagccccagcgcaaaggggcgcaggagcgggtacacgtctatgggttcggcacgtgcgagcgactgccacacttttgccgccacgtagaacaaagctcccagcccggctatccctttcgctacccctgtcatgttgctgcacaagggcatcatttcatcgtacagcacccgcaacacttggtgcaggttgtcaaaatccactgctgctaataacataggcataccgatttatatgttaccagtagcgttcatccgccgagccgtagagagccagcacccggtcggtgtcgtttttcttctttgcccgcaggtaggacacggaaatgttcttgcgggtgtagtagttcacgaggttgcggtaattcaatagacttcggtaggcattatcaataatagccagccgttcggcatccgtcagcgacatacccgtgatgttcactacattcttcaagtcttgcaacacgtccgagctttccgacatcagtttggcatagccgaacgatattgccgacagttcgtcaggcgtgaaattcgggtctgccagcatactttggaagttgcgcacgtagatttcggagatttccgccaccagttcaatggacttcttcaccttgacaccgcccttaaccacgtcatgcaccgctttgagcgcatcgtaatattttttaccctgctggaaaatcttctgcgcttccatgaagccgtccagcgtgttcttggctgtggtggaagtctgcactatctgcttggtggtgttgatgataccctgtgccaagttgccggggtctgacaccacccactgggcggatgccttgccgatgaagcaaaggcataccgctataaggagaattgttttcttcatgttcctaatttttaagttgttgatgattggggattgcgtttgctttccgcaagccgcttgatagccagttcaaggttgccgcccagcttctcggcaagggcaaacagttccattttttcgctttcctctgtcgtgaacgtgaaatattcttccaacgaaacttccgtggcgtacaccgccgactgcgtgccgcccagcgagaagaaaacttccttgtacttccgtccggggtggttcgccatgttgatagacaatatctgcgaacgctccttgtcggtcagtccgagtaggttttgtatgctgtcgaacttattgagatattttcgctggtctaacaaaatcttgcagtccgagttattgatgatactctctttcactatgggcgaggaaataatatcttccacttcctgcgttaccacaatcgcttccccgaaatacttcctgacggttttgtacagatattttatgtagtccgccatgttcgccgatgcaatcgctttccacgcttcctcgattagtattaacttccttattccctttaacttgcgcatcttgttgatgaacgcttccatgatgatgatagtcgttatcgggaataaaatcttgtggtctttgatgttatccaattcaaagacaatgaagcgtttatgcagcaaatccagctccttgtcagagttcaacaggtaatcatattcaccgccacgatagtacggttcaagcacgttcaggaagttgtcaatgtcaaaatccttttccctgacgttcttctgttcaagctgtcggcggtaatcatccctaacaaactcgtagaacgtgttgaagcagggcgttaccgatttatccctcgtgatacgttcgatataggcacttaccgcattggacaacgccacttcttccgaccgcttgggggcttcatcgtcccgcttccacagggtgagtataagggtttttatactctcttttttctcgatgtcaaataccccgtcctcgacatagaacgggttgaacgctatcgggttctcgttggtgtaggtgaaataaatcccgtcctcgccgtgcgtgcggttgtggataagctgggacagccccaagtagctgttacccgtatcgaccagcagcacgtgcgccccctgctcgtaatactggcgcaccatgtggttggtgaagaaagacttcccgctaccgctcggcccaagtataaacttgtttctgttggtcgttatgcctttcttcatgggcaaatccgatatgtcgatgtgcagcgggcgaccgcttaccctgtccaccattttgatgccgaacggcgaaagcgaactcttgtagttcgtttcttccacgaacaggcagagagcctgccccaagaacgtgtagaaactttcctctgcggggaagtcggcttcgttgccgggtatgcccgcccaaaagagcgtgggcgtgtcggtggtgttgtggcgtggcttgcactccatgagtgcaagctggcttcccacatcgttgcgtatgcgtttgagttcgtccctgttgtcactccatgccatgacgttgcagtggcagcgcaccgagataagccccttgctgtgggcttcgttcaggtactcgtctatccactccttgttcacttggttggcacgggagtagcgggagagcgattgcatattccgggcggtctgctcgaagttcttcaggttttcggcgtggtcgtctataaagatgaattggttatagacatggttacacgacaacagcacgcccaccggggcggcgaatgacagtcggcagtcgctccggtcagtggacagcttctcaaatcggcagtccgtcccgacctttccgggcaaatcttccacgtccgaaagcgtgtgcaggcacagtatatcgtccccgacacgcatttcttccgggtacagcccgatgtctttcaggcaggtggtatctgtctgcgagagcgagaagtatttctcgatgatgcccgcctttccgtcctgcccggtgatttccgatgccgccagccgggtaagcgtgacaaaaccgctgtcgttcataatcctttcaaactgcccgaccgcttcgatgaactttgccgccgcttccttgtcggctatctcctgcgggacaatcctgccccggcagagggtggagaagtcgctctgtcggcggcttctctcccttgtcgtctttgtcaggaacaggtagcagtaatggttcaggaacgggcgttcattgaaatgccgttcaaaggagcggcttaaaaagctaagttcgtccctttcggtgtcgggctggtagttctccttgatgaagaagtcctgcttatgtactatggagtagtcgggcagtaccttgattgccttgtaccacgccgaatgtatggcttcgtactcggcactggtgacggtgaacagttcgggcagttccaccctgaaagccaccgttatgtccgcatcctttgaaatgatgcagccgttctccaccgccaaaagtggaaatttcctttccagcgtggtagcctttaatgtattcctcatgttctttcttcctttcttcttttgtaattgaacagccggggtatcgcctttcggctgataatgaagcgtgggtgtcttttgcgtgcggctgctttcatcagcccgtgcgtgccgtaccgtgcgttgagccggaacgtctgccacacgagcagcagcgaagccgacacgatgaaaccgatacatagccactggttcacgcctgccatgaacaggacgatgaacaccacgaagacggcaagcaagccgccgcaaaagataaagaggtactggcttttcagccccttgaactccaccggcttcccgatacccctgtttaccggatattcagacatagccgccgttttataggaagaacgaacgcaggatagtggcggcgacaattaaaaagatacacgccccgaaccaactggcggcggtctttgaggtgtcggggtcaccgcttgaaaatttgttatatacttttaccccgccaatcaagccgcagaccgccccgattgcgtacactaattttgttccggggtcgaaatacccggtgattaggttcgtggcttcggtgatgcccgcctgcccgttgccttgtgcgtaggcacttaccgcagcggcaaggatagccgccgacaaaaagattttctttctcattgtgatttgtttttaatgccgggcggcgggtgggaagtccgcctttcccggctggtgaataatttgaaattttagtggttcggcacggatgccgtctgttggttttcaggttgccaatcaaccgtagtcacgttgcttcatattgttacacattattatattataggaaatcgttcatgtcgaacgcttcatgttccttgcttgtaccgccagcttcggcaggagcagcaatagccagttccgcttcgttgcgtcccagcagttccgccacctttgccagcccgccgttgatgttctccaccaccgcatcgtagaggttcgtcccctcaatgcttgccagtgtcccggcagcttgccgctgttccgcttcggtggagttgtcggcgttcgccgtgcgtaccgcttcgcccagttcgtcaaagctcatgcccgtagcccgcccggtatcatcgtcaccgtccatgtacccggctatttcctcgtcctcgtagtcgggttcgtcattctcgtaaccgggcgttttttccgcttcggctgctgcttccgaaatgttttcttccggctgtccgtcagcttgcggcgcaaaaatagtatcattttcagccgcttgcgggagatgtcccgatttgtcctgcgctgtcccgattagtccacccttgtatcggctttcacctatcagcgtgtagcctgaaacttcgtttcgtggaaacggcgcatcatccgttctgcccggtgatgtccggctgtccgtgtagcgataccacagccacagggcgatatagtacaccaaaagcccggttaatatgcaataggctaccatagctaaaagggcttttggaagtggctttcgtacagtgtgtttatctcgtcttggtactgctcgaagtggcgcagcagaatgttttccacgtagctgcttaccgtcacctttcgcccgcctatcaccgtcacgatacgcatcagcttctcgtgcgtggtacggctcacgtacaagggctgtcggtctgccagttccactttctgaaagtaggtttcccggtagtcacccgaaccgcccttgcgcttgcggggtgtcggtttctccacccgcaccgtttcagtctgccgtccctcgtgggcggtttccgtttcgccgccgggctgcggtacatcatccggctggctctcccgcttggcgggtacgccctgcgagataagttctttcatgaaatcctcgtctatcttcggcatcccgccgctttgctttgccatatcattttaatttgatgtagtacactatttcggttatcagttcttccaagttgcttccccttaccagcgggcggctggcgggaaagagcgtggagcggaacaccacctttttatccgccaccagttcctttttgtagcgtttggtgtcggggataaaggttttcatcagtggcagttccagttccttaatcgtcttgtcgtaggcggtgtaaaggtctgttttctcccgaccgtccaccatgttccaaaagaggtacagcccggcaagtcggcaggtttcattttttaccagcaacttgtggatagccactgcaaacgataggctgctttccagcaccaccttgtcggctgaaatgggggtgaagatataatccatgcctgcaagggagtttatcacgccctcgctgttcaccgtgccgggcaggtcgaaaaagacaatatccggcacgtgtccggcggctatatgttcgtcagctgttgcaatcgccttttcgggcgaactgcacagcaccgggtaggctttcttccccagccgggtaaactgttcatacgccattcgcttgtaatcttcatccgccccgacctgctcggcatcccgcttgcgcatcccggcaatggagtgttgggggtagtcgcaatcgaccaccgccacatcgtagcctttgaggtaatagaggtaacttgccgccagcacggtaaaggtggttttgccgaccccgcccttttgggtggaaaaggcgacataaaggggtgttttctcgttttccatattgctttcgttcattattggttgatagatttatttattgctttcaatcaatccagccatatagcttccattctttccatattgcaatcttgaaagacttttttatttcaatcttgttttccagttttcattctttcttgaaatcttgaaatcctgcaatcatgctttcttgaaatcatgctttcaatcattctttcctgattggaatatttctttcaatcttgttttcaatcttgaaatccgatgcaaaaaaagggagaaaaaacgtcccctgaaaaccttgtcccaatttgtcctgtgctgtcccgatttgtccaccaaccgcctattttacagcattataaatcaccgttactttgcagcggagtaacgaaccgcagggggcggaggtgtaaaaccgggatggtgaaaggctgggcttgccgcttcacgctaaccccaatccgtccgggacggatttcgattttcgtcagaaaatagcaaggtgtgttttgtagcatacaaaaccgttttccgtgcctgaaaacgccttgccccttgcgggggtaaaaatcactccgaagtcgtaatttttttaatccaaagaagcatggaaacaagaagaaccaacaagggcggtcgccccgccctcgcagacccggcgaagcatcgccatgtcctttacctgaacgaccgggagaacgcccgcttcctctcgcaatgggagcagtcgggcgttacgagcaagtcccgtttcatcgccgcccggctgttcggcgatccgttccgggtggtgaaagtggacaagtcggcagtcgactattgcgcccggctgaccgaattttatgcacaattcagagccgtggcagtcaattacaaccaagtggtaaaggcgttgcacagcaatttttcggagaaaaaggcactggcttttctctataaattggagaaagcgaccactgaactggcgatgttgaaccgtcaggttatcgacctgacaaacgagtgcaaggaactatggttgccaaaataagcacgggcggcaatatgttcggcgcactggcgtacaaccaaaacaaggtggacagcgaggaagcaaaggtgcttttctccaaccggatgctgttgggcgaggacgggaatttctctatcggcgagtgtatgcgcagctttgaaatgcagatgcccgtccagctatccaccaagaagccgatacttcatatttccataaacccgcacccggaagacgtgctgacagaccagcagctttccgacattgccaaagagtatatgcggaagttgggctatggcgaccagccttatttagtgtacaagcataccgacatcgaccgccaccatatccacatcgtggggttgcgggtggacgagaacggcagaccgctgaatgacaggttcgagcatcggcgcagcaagcaaatcacccgtgaactggaaaagaaatacgggctgcacccggcagagcgaaaggaacgtgccgaacgcccggaacttaaaaaggtggactatgccgccggggacgtgaagcaccaaatcggcaataccgtgaaagcggcttgttacggctaccgtttccagtcgttcggggaatacaaggctttgcttgccgcttacaacgtgtgcgtcgaggaagtcaaaggggagataaacggcaagccctatcagggcatagtctattccgccatgaatgacaagagcgaaaagacaggcaacccggtaaaggcttcccgtattggcaagtcggtgggctatgaagcggtgcagcgcagaatggagaaatcgggcgaagcaatcaagaacgggaaactgaaagaacgcacccggaggattgtagccactgccatgcagaccacacgcaaccgcaaggaactggaacaacaactaaggaagcagggcattgacgtggtatttcgtcagaacgacagcgggcgcatctatggcattacgttcatcgaccacgacagccgggtggtgctgaacggttcacgcttgggcaaggagtattcggcgaacgtgttcaacgaacgcttttcgggcgaaaccgaaaaaatgcaccagcccgaagtggaaataccgcaacgggaacaatccacgcatcaggaacagccggagttcacgccgaaatccgatatcgttccgggtgtggcttccgtgctgggtgctttcggcggtttgctgggcggcggtgcatcaggcggtgacgagccgcaggacaccgcccgccaaaaaagaaagaagaaaaagaagcgcacaaggcgcatcgactaactaaaaaaacattacaatcatgcaacaggaagatgatttgagagggcttgcaagggtcatggactttatgcgggctgtcagtattctatttgtgggaataaacgtgtactggttctgttactccaccctgaaagagtggggagtaacgtttgaagtgatagacaagatactgtggaacttccagcgcaccaccgggctgttctcgtccgtcctttggacgaaactttttgcggtggtgttcctcgccctgtcgtgtatcggcactaagggtgtgaaagaggaaaagataacgtggacgaagatacattgcagccttgcggcgggtgtcgtgttgtttttcctgaactggtggctactggaacttccgctgccacacacggcggacacggcattttacatagccacgctgtcggctggctatatctgtatgctcatggcgggtacatggatgtcccggctgttgaggaacaacctaatggatgatgtctttaatacggagaacgagagtttcatgcaggaaataaggcttatcgagaacgagtattcggtaaatctgcctacccggttctactataaaaagaaatggaataacggctggataaatatcgtgaacccgttccgtgccagccttgtgttgggaacaccgggcagcggtaagtcgtatgcggtggtaaacagttacataaaacagctaatcgagaaaggttttgcgctttactgctatgattataagtttcctgacctttcggaaatcacttacaatcatttacttaaccacttggacggctacaaggtcaagccgaaattttacgttatcaactttgacgacccacgcaagagccaccgatgcaacccgataaacgccagcttcatgtcggacattgcggatgcctatgaagccagctacacgataatgcttaacctaaatcgctcttggataagcaagcagggcgacttcttcgtggaaagcccgattattcttttggcggctataatttggtatctccgtatctatcaggacggtaagtattgtacgttcccccacgccattgaactgctaaataagaaatacgccgatgtgttcaccattttgcgcagctatcccggactggaaaactacctttctccgttcgtagatgcttgggaatcagatgctcaagagcagttgcaggggcagattgccagtgcgaaaatcccgctttcaaggatgatttcacccgccctttactgggtaatgacaggtgatgatttttcactggacatcaacaacccgaaagagcctaaaatcttggttgtcggcaacaatcctgaccgccaaaatatctactcggcagcactgggattatataattcccgtatcgtgaagctgataaacaagaaaggtcagcttaaaagttcagtgataatagacgaattaccgactatatattttcgtgggcttgataatttgattgcgaccgcccgaagcaacaaggttgcggttctgttgggctttcaggattacagccagcttacccgtgattacggggacaaggaaagccgggtgatacaaaatactgtgggtaacgtgttcagcggtcaggtggtcggtgagacggcgaaaatcctgtccgagcgtttcggaaaggtgttgcagaaacggcagagcatgacaatcaaccagcgggaaaaatccacctcgataagcacccaaatggacagcctgatacccgccagcaaaatatccaacctcacgcaaggtatgttcgtgggtgctgtggcagacaacttcgatgaacggatagaacagaagattttccactgtgaaatcgtggtggacaatgaaaaggtgaagcgggaaaccgcccgttacgtgaagctgccgcagataatagacttcaccgacaaggacggcaacgaccggatgcaggaggagatacaagccaactatgaccgcatccgtcaggaagtccgacagattgtcgaggacgagataacccggattaagaatgacccggagctatgccacttgattaaggaggaagaatagctgtatataataatgtatggagtgaagaacagccgatgtagctttacggttgttcttcattttgctttttggtgcggtaggcttcaaaacgcactaatatttcgtgcaggttcttcaatgcttccacagccttgcctatcggcggcatcttgcttttgtcgaaagttagtttcttcaaatcggtagtgtatgccgtagccacttcgggcaacgccatgaccgcttcggcatccttgaatatcggtgcatcagccagcgacaagtgcgaacgggagtttttatttagtccgtcctctatcgtcacccggtacatggcatccaagaaatcttccgaatgtaggtaatcgttatattcctgattgtggtagagtgccgacaagtcgtaaacgtcacggatatgctttgccagcagtgcggctgcattctcattgtaagacagctttaccagccttgaaaccttgtcgcagatagtctttcgaggattgatacactgtgtttcaaaactttccagcccgtaagtgcttatcagttcctcttgcccgatgctttcaagaaaggcggtcacaatcggtttgataacccgcttgtccgccgggtagaacatcagttttttgtccggcaggtcacaggattttatctctacttccaaatgttctttcagtcccacgccttgaaatacattgtcatacgagaaatacagtttacggtaattaccgcccgtttccgacaaatcttccttgtatatgtcactattgagttcggctatgtatttggaaagtttcttgttcaatgtcttttccgcttgcttggacgtacctttgtcacccgtaaacacgaacaagtccaaatcttccgagaaacgttctatcagcccgtaggctttggaaagtgaagttccgcctttgaagtaggtcttatccgcatattcggacatggaaatatcccgcagtatcttcgatacccagtaatccttttccacgtgcgactgctcgtagccgaaatgttcagccgccagtgcgatgatttccttgaacgcttccttgtccgaatgtaaattcatatttctgtcctatgctgttttataatccaagttgaaccgtgtcgtgggaagaatggtctttgccatttctgtttgcaatacggtttgtctgatgtcgcccagtatatccgccaccacctttctgacacgtggcgggtaacttttcgccaaagatacgattttttccagttccggcaggctgtacccgttgaaatattggctcttgacccggttgtagatgtcctgcccggttgttccgggtatgcgcttcatgtcctttatcgcatcgagcagccgcaagtacgggacaaggctttcatccgagtagtccatgcagtaggctttcacgcactctatatccaagttcttgaaacggaaacggcgaaccgggttaggagtggctatcgttatggttgtggcaacctgttcggtcagtcccattttgttatagatgtaagccccagtgatatagccgttcagtttttcagtcaggtagcggaactgttcatcctgatagacaggcagctttcccagccccagcactgatttcttgggacggtagtacgcccccttttcaacccgtaccagtacccctttgcggctctgttcggagagcagtaccgcaacattggcggtcttttccgtttcaaacgacaaatcccggaacgtgaatatacgcccggtatctatccgttcaatctgcccaagtatctcttttctgaatgaagccatatttatgtcctttgtttctatatgcaaagatagtatattatgtaatcacctgcaaaaacataacaaatattttgccgaagatgttttctatttttccaactattggttggagattttttatccaccgggacaaatcgggacagcgcaggacaaattcggacagcctttgccgcccgtccaaatatagcatatttagtcgctacctttgggcgggactattcccgtaaccactaaaattccaattatttatggcaaacagaatgaccccgcccgcagaggggcaggaaaaagacgtgctgctggtcttggataaacagcagggaaaggtgagtgccgttaaaggtattgacaaggagggcaatttgcagaccgtactacccactaccggacatggcggcgagttcatgcaggtggacaagaacagcgatgtgttcagcaacttcatttccaatttcttccgcaagtttcaggacacttccgggctggaactgttcagcgtaaaggcttcccaagcggagcagaacgcaaaggcaatcgagaacaatcaccgcaaccatacgccggagggcaacaagcgggctgaaatgcttcgagttccgaagcccgacttccacgagttcaagcagggctaccgcttcgacccgtcaaaaatagactgggagaacctgaaaaaagtcggcatcaccgccgacaccctgaaaaacacgaaggacttcgaccgggtgatgcgtggctacaagtcccgcaacacctacaccgtttcggggacagtgggcggcttctacctcaaacctaccgatgtcaagctctctttctatcaggcaaaggacggcacggtagtacccaagctgcacggcgtgcagcaggacgaaaagctgttgcaacgcccgttccatgaacacgacttcaccaaacaggaacagggcaacttgcaaggcacaagcaacttgggcggcatcgctgaaatcaaagacccgaaaagcggcgagcaaatcctcgtgttcgtcagccgggacaggtacacgcacgaactggaatatatgcgggctgacaagtggaaatgccccgataccatttgcggcgtgaaagtcagcccggagcagaaagccgcctttgaagccgggcaagcggtgaaaatggaaaacctgcaattcagggacggcacgaagcgcagtgcctatttacagatcagtgcggtggagcgtggcttggagttcctgccgaggtctgccgtccagttcttgcagcagggacaacagcccgtagagcagcaggtagccgggttaaaggacggcaagggcgttgagttcaacggtcatgtgcagcccagcgcacagggcaaatcctccgacaaggtacagccgaaagacgttacccccgccgccgagagccggacgcaggtagcggtcaattcggagggcaaaaccaacgaagccaccaagcagagtaaagagccgctgaaacagggtcaggacaagcccaccgccaagcagaaagagaaacaggataaggcgcagaacaagagtctgaatgcggataaacccaagaagtccaaaggaatgaaattataaaggtatgcagctaatctatattatagctattccgcttgtcgtcctgattttcttcatagtcctttctttaaaaaccgactggaaagaaatagacaggcacaaccgccagtattacgtgggcggctaccatatttattatgaccgtaaaattttacggaaaatcaagtcagtaacaaaccataaaaaagaaacaatatgattgcattgatagcagagaagcccagcgtggcaaaagacatcgcccgcatcatcggtgcgacccagcgtaatgacggttatctttccggcaacgggtatatggtgacatgggcgttcggccacttaatccagcttgccatgccggaagcctatggcgtggcgaacttccgcagggagagcctgccaatactgccgcccgatttccaattaatcccccgtcaggtgaaagcggagaaaggttacaaggcagaccccggtgtgctgaaacagttgaaagtgataaaggaagtgttcgaccagtgcgaccggattattgtcgccaccgatgccggacgtgagggtgagttaatcttccgctatatcttccattacctgaactgccgcaagcctttcgtgcgcctgtggataagcagccttaccgacaaggcaatccgggaggggctggataacttgcagccgggagagcgttacgataacctctacctctctgccaagtcccgcagcgaagcggactggctgatagggataaacgccacccaagcgttgagcgtagccgccgggcagggggtgttctcgctgggcagggtgcagacacccacgctcgtgatgatatgcagccgctatttggagaacaagaatttcgtacccgccaagttttggcaactcaaagcggcgaccgccagcgggggaataagtttcaccgcccaatcgaccgccaagtgggaacagcagcccgaagccatagccgtcctgcaacgggttaaggatgccggacaacttgccgttaaattcgttgagaggaaagaagcctgccaagaaccgccccttttgtacgaccttaccacgctgcaaaaggaagcgaacacgaagctgaatttctcggctgacaagacgctttccatagcgcaaagcctgtatgaaaagaaagtgatgtcctacccgagaaccggaagccgctatatatcggaggacgttttcgatgaaatgccggagcgtgtcgccctgttagggcaatacccccgcttcgccgggtatgccgccgggctggacggcacacccctgaaccgccgcagcgtgaatgacggcaaagtgaccgaccaccacgccttaatcattaccgagaacctgcccggcgaactctccaaagacgaacgggcggtttacgagctggtagccgggcgtatgctggaagccttttcgggcaagtgcgtgaaagacgttaccaccgccatattgtcggctggagataccgacttcacggtgaaagggtctgtgatgaaagtaaccgggtggcgtgccgtgttcggcgagcaggaaacgggcggggacgaagaagccgccagcctgccgccgcttcaagagggagaatatttgccactctccggcgtggatctgctcgaaaagcagaccaagccgaaaccgctgcacacggaaagtagcctgcttgccgcaatggagaacgccggaaaggaactggaagatgccgagctgaaagccagcctgaaagatgccgggataggcacgcccgccacccgtgcggcgattatcgaaacgctgttcgcccgccagtacatcgtgcgtgagaagaagaaccttgtgcctaccgacaaggggattgccgtttacaagatagtcaaggacaagaagattgccgatgtcgaaatgacgggtatgtgggaaaccgctctttccaagatagaagcgggcagcatggatgccgacacgttccgaaagggcatcgaggtgtacgccacccaaatcacggcggaattgctatcggtacagttatctgtcgctactggtgaaacctgcccctgcccgaaatgcggtagcgggcgcatcctgttctacccgaaagtggcgaagtgttccaacgtggactgcacgcttaccatattccgcaacaagtgcgacaagcagctttccgacaagcagattgtcgagctggtgacgaaacgcaagaccgggataatcaagggcctcaagggcaagaacggcaaggctttcgatgcttcgcttgtgctggacgaacagttcaatgtcggtttttcattccccgaaaagaaagcgaaaccgaagaaatagcctatctttgccgctgaaatttcattgtgataggttttgcaacttataataattgaaattttagtggttgcgcccggcgggaaccgggcgcattttttatacgctcccgccaaacaagtaggtcgaacagaccaccccgttatccagcaccctgctttccaaaagtttccacagcgagccgaatgtttccccgataaagccgatgcctttgcccgccatgaccggaacggtgtagattgtcaggctgtccagcagtccggctttaatcaatgaagtaagtatcttgccgccgccaactaccagtatgtcggttttctgtttcagttcatagaccctttgcagcggttcttcggtcaggaactccacgccgcaatccggcgttacgttggtgtcgtagtgtgacaccacaaaagaccgcttgcttttgtgtggccacccgccccagtgttcaaagatgtagttgtaagtgttcgcccccataagcaggcaatcagcatccaaatagtatttgccaacgatagtttttacttcgttgggtaaccaatccagttccttgtctaaggtggctgtatgtccgtcaagagatacggcgatgtgcgctttaatttgtttcattttatcaggtattaaacagtttactaatccgtattcaactgtccgccagcatcaaaaaagaagcgtgaccttacactgcttcaatgcgaggtactggcatacccaaatgtggaaacaggcaagaccacgctatgacaaaacatagcatatcctgcgctgaatatccccacattttgaaaagtgccagttttcgcatcgggacgttcggcgaacgtatatgttatatataatgacgatattacagccgaaactgttcaaccgccgttattctcttaagttacttttgcaaaagtagcgaaaatcaccggaataaccttataaataatagaaatcctgccttattatcataacaagacaggatttaaagaagaaaatatatgatattgattatcactcaatccgtgtgttcacggattaacttgtgtatgtcgcttgcacggtagaaatattttccgtctaatgttaagtaaggcagtattcctttcttgcggtaacgctgcaaggtcttggtgcttactttcagcataaagcacaaatcctgattgtcaagcagcttttcaccgttcaggtaattatgttcgcttaacaggcggtctatcttcctttcctgcatatcgaacctgtccatgatacgctccatccatgccacaaagttttctttatctatatacataatgttgtcggattaaataagacctatcataaaatagctttggtttgccgggtctttaacgataatgtcccgttcacgcatgaagcggatataactctttgcggtacgctcttttacgtccaagacctgctgtaactgttcgcaaaggtctatgtaggtgatatgtgtctgtcgcccgaagatgtcacgggctacatttaccagttccctttccttgcgcttctccttttcctcacggggcttttctcccttgtacacgtgcatcccggcttccttgtcccacgcaaagagcatcagcggcacgtccagcgggctaccgtcacgcactttcagggctttcaccaccgattgcgtgggttcttcgtctttctctattgacaagatagtagccgccttgcgttgcagttcactgcccaaatgcccacgtaactttaatccgttagggacaaagtgcaacacgcaaagaatacatgtgttatagatgcctgccagtcggtaaagttcatctatcaccgccacgctttccgcttcatcgttggcactctttacaaggtcggcgatgccgtcaatgacgaccaactggatgccgccgtactggtaatagaacttatccatgctttgcactatggcgtgtaaacgctccttgcgtgacatacccgtcaggcagaacgctttcatttcgtccggcttgtccggctgcttggcacgtgccagcaagttgcttacgttcttgaacagttgcacttccgactgttcggtgtcatagagcaagaccgccttgtgcctgccgttggcggttatctgtattcccagcgtatctacttccgcaccagtcggacagatgcagcccgccacgattgcggctacataattgctctttcccgttccctcgcctccggtgatgccgaacaggttgccttgtgttcccaatggaacatcgcccgccgaaataatcacctgtgctttggcgggcgggttgttgaaatctatctcgcacgattttagcataatcaatgtgtcgctatataggttgtctaaaaattcgataaacagtttcaggaaatcttcacgggtgttcccggctttgaagtagtcggaaatgtccttttcctctttcgttcccggaagcggaagcagcaggcgtttcacgccaaattcttccagtagcttttcctgcctgcatgaactttccctgcccgtcttatccatatcgaaaagcaggacgatatgcttgaagcggaacgtcagccgataaaccagcgttggcggtatcgtcaccatttcgctgttgaaacagatagcgtggaagccgtgcgccgccagcgaaagcacgtctttctcgccgcccgtgatgaatagcgtgtcgcctttggcgggcagttgctccagcccgaagcagtagttttcgccgaagctgccaccatagaggaagcggggcgtggagaacgggcggtacagcttgatatactgtttgcccttgtagccgtacatgggttctgtcaccgatgaaacataggtgtatggtttcccctctgccgtttcactatggtattcccggagcgagcagaccttgtaatgctccaacagttcgggcgtgatgccgtactgctgccagtacaccagttcggcaagcgggaatttctgttcccggaactggtagggcttgacggacttttcgggtgcttcttcggttttatccgataccgtccggcggacgcttgccgtaggaatggaaacaggagtgccggaagccagccccaatcccaaatcccggtcgataatctccagtatctccacgaagtcagctgcccgattgcagtccagcccctttagctgccccacgaagaaaaagcagtcgccgctataattgtcgttgccgaaatctttcatcttgtacataccgctatggcggtcgaagtagatgttacacgatgctttcttatcctgataaaacggattaagaaaattacgacctatgcgccagttgccgggtagatagtgcttgaacacggacaatccgctatttgtcctgcttagaatttcttctttctttaacataagcctcgtgatttgctactaaattccgcatacattcatcattgctttttatcagccgttcttccaacaggcgttttaactcgcctatcttataataacaacgccctccaatattggaataggcaatcgtcccattagcccgtaagcgttgcagggtacggtcgctgatttgaagaaaggtgcaaacctcgtaactatccacccaaatttcatcctcattcgtcctgctctcgtccaactggttgaagatgaagtttgcaatggcggtaatcttattgtccagttccttgtaggctttggactcgaatgttataatttccatattgctaacttattgatttgctgcaaagttcggaataaggaataacctaaaagtcatggttatacctatcatggtattattttttttaagggaaaaatcgggtgaaataacggataatcccattgaataacggcattttgtcaataaaactacctacaaaaaaagaagtaccatattggggtgaacatggtacttctttacattgtgatacagaggattatttcatatcatcctcattcatccgtttaatcagactatctataagacgatgaagatatgccgtccggtcttttctctctttcatggctatgtaggaagcatagtaatcgcccaaatcgacttgaaacaccataccaagaaacttcatcatctcctttatctctacattgccattattgatgtcacccgaagagacgagggcataacccagttctatcaaaaagacctttttgcccgtaaagcggaaaggatatttcagatgcctttgcgggttatcttctatctgattgttgttttcaagtttcatcagccttttgttcaaatagatacgcagcatttcattggttataattttagccaccttatagtcatatccggttgaaaaattcgggtctttatcgaattgtgcgctatcggtgcataaacgcaaatcgacttttccacgaacgaaatagtattcatcatatatcgtagaattggaacggtagtattggtaaaagtccaaattacgattgaagaaatacgttaaactatccaactcattacaaagatattttcttgcgacttcattactgccattcggaaattgcatttcaatgcgatatactttatagaagtataatagccgactaagaattttaggcttttgttccttgaaaaagtgtatttcagcagaaatcgaaggaaacacataattcattacatattccctaagttgattgaacattggttgaatgaacttgatgatacgtaacgcatcatcaagttctatttcattatccaattccaccgattctatttcagcattgatttgaagcagtatatcttctacaatttcttttatacagcgttccatcaaattggaatttagaattttgttccatactttttcgcttcatctaccattttggataaattcttatcttttttccgtttctcgtgttccgaagccgaataatgggatatttctcttcttagcttcaaatagctgttataaacttctttatccagtaagcctttgtttacagcttccaagacagcacatccagcttctaccgtatggctgcaattactgaaacgacattctttcgcaaaatccgagattttcataggctccaacagtaaatcggaattgtgaatggctaacccaaactctcgaaagcccggagtatctattagaacgccccaatcatccaataaaaccatttcccggcgggttgaggtatgccgtcctttctgtgtggaagaactaatctctgatgtactcagtacagatttgttgcaaagtctatttattaaagaactttttccaacaccggaagagccgataaagaccaccgtttcgtttcgtgctatacattctcgtagccgttgtatcgaaacaggctggtgtatgcttgttttaagtataggcatctgatgcttcaacaggacttcattccaaccatataattgcaaatcaatcattgtttcttaattttagattttctttccgatataaaatacgtagccataaaagcccttatacttattatacaaggcttcttcaagatgctgaaactctatgagtttctttacggtttcattatggggatatttttccagcattagtttacgggcttcaatcaaaggctgatagtaatgttccgtccagcatttttccggcaatacaaatgaagcaaccgggagatagccagccctctgcatttgtgcgactttgacaggaattgtatctatctcttgatacccctgcatccaaaaatcgtgtatttcagccggacgctcttctgtaaaccatgagctttccgaaaccgcaatatacccaccagatttcaaataatcacgccattcatttatacctctctcaaagccgatattataaatagcaccttccgaccatatcaagtctaaagattctttttcaaaaggcagattgtccattgagccgacaattcccttcactctgttttgcaaattcagctttaaggcatcaagattaaacttgtcaataaaccctgaaaagaaatcaagtcctgtaatagttcctgatacattttgtgccaaaaccatagtttgacctcccgttccacaaccaatgtctgcaatctgcgcagtatcactcaggttatcaatgaaacttaaagcctttaatgtaacatcaggacttcccggaccttgccgttttgtattaagaaaaaattcacaaattaaatttacatcaaatccgtaaattgcgttgttatcgttattcattttcattgtatatattgcatacagggaaaacataataatgccttacctatacgcagattaaaattataatataagtacacgaaaatacttcccgaaaagaattatccgagagtaaacgtaaagaacaatctacattagaaatgtagattgcttacaacacaatatccgattggtttgcttttttcatacgggcaaagatagtgaattattttatgccatgcaaattcagctttgaatttagtgatacagaaaagcaaatatctcatatttttgtgctatacctattatataatatacaaatcagccctccggaaagaaagatagctggtagaataaaccaatagttgttgcttatcagaaacttggctatccaaaaagaggggagaaatgcaaatacatattgggtactatctgtaatgacaaaaggtattattaatcccaccataaccaaagcagatactttggcaagcgccatgccttccactttattccctgcgtatgccaaaataatcatagcagccacaacgcttagtattgtagccaatatggatatgataaatgtagtccatactgacatatctgatacggaacagaaagaaagcagcacgaaagaaacaatagctgcaaataaaacaggaataatcaatcttgatataagataacccttctttccaagtggggtgattgtgatatacctgttgattttcatatctgtttcatccaataccactaagaccgaagcgaagcaaatcatgtaaggacacataattgcaaggaataaatccaatatcggataatacagattgaaatcctttagcatcggataatgctgtacaatcaaggggaaaacaaacctatatattgccgctaatagcaacggaatacatattattgcagataacataccatctgagaatatgtttctgataaacatcttgaaggaaataatattctgattcataattatatcgtcatcattttttttactgacagacaagaaaaaatatacatcgcaatgcaccaaatgattattgccattagagacatgacactgatatttccagacataagttctataaggcttatacttggatgtaaaagcataactcccgatttgtagcccattgtataaacagatatgggagctacggatattattaaagtgggaatcataatcagcataaagttattcatggttgaaatgaaagcggaaagtgatattccaaccagtgtaaataatgctgaacctaacataattccagtaacaaggtgtatgtaaaaatgttccatgccagagaataatgcgatgagaactccacttagcaaagaaatcagcccgatagaaattacctttgacaaaatgtatgcgtgtaccgatataggcgaaacagctaatgcctgcattactttttcgcttttctcgaataatatgattgctcccataaacattaatccaatcagtacggggtctgaaaatataagggtagttgtgcatagttctttccatggcataggaagaatacgcaacactgtaatatacaccagtgtaaataacgtatatagggcataaaaaccatatttgtattgttgccgaatatcgcctagtattaaacctttaagtttcatagtaatttcctccctgttatttctgaaaatatattgtctaatgtcggctcattgctatgtattgataacaaagcattagcttgaatcagagattgcagttttttgtctgtacttattttgtcaagtgcgattgtagtattcaattcttgttgattctccaaatatgaatatgtcacttcattataacgcctcgacatgataagattatgaggagtgtccatagctttaatgttaccgtcaacaataaatgccacacggtcacaaagttcggtcgcatcgtgcatattgtgagtagtcagaatgattgtcactcctttatttttaagctcacgaataatgtttttcatcacttgggagtttgaggggtctaaacctgatgttggctcatccaaaaataacactttgggctgatgaatgattgaccgggcaaagttcaatctggacttcatgcctttagaaaaacctgccactttcttgttggcatgttgtgacagtccgaccatttctaataattgttcggcaggaataagtttactgtcatataaagaaccaaagaatttcaagttctccaatgcggtgaatttctcataaaaactaggaaattcaaaatcgacaccaatactctcatagaaatgattagacttatttctaacctcattattattaacagaaacactccccttatatttagggagcatacctattaataccttttgaagagtgcttttccctgcaccagaaggtcctaagaagccaaatatttctccgcttcttacttgaaagttcatattctcaataaatggtagttgagaataactaaacgataagttttttactgtaatcataattttccagttttatattatatgactaaaattatttatacggtcatattgtaaattcagagcatcgctatgtgcatatttgcacatagtcagttgatattatacaatcttgtctgtgttggattagtctttaaaatagttgctgtactatccccctaaccataaacttgaaaacttcattgtaaatatctgttccaattgttttctcgtttagaatagtcaagaatgcggctcttaaagcccctgcaaatacctttgtgtcaattgatttattttctggaataaattttaacagttcgtttgccaacatgacatcatcatccacatgttttgaaagtacttcttgagggagctttctgcttagatattccacgtcactattcacaaagacagatacaaagtatggcttgttgttgattagcaagtcagatataatatctgtcaatgtatcaaccgtaatattatcggtatgcttatttatggcattcagaaattctttttccaatttcttatgatagtctattatcgtatcgaaaaaaagaagttctttcgatgtatagaacaggtaaaatgcacctttagaaatattggcatatttaacaagctcatctacagaagttttacgtactccttgttgctggataaatagtaaagctccttctttgagtttatcctttataaactttctttcgttgtcatcaaatgcttttgccataccgtgtgactattttattattattggtcactgcaaacatacacgttatttttgaattgacaaagaaatattggtttatttttctcagaaagttatttcatatcatcctcattcatccgcttaacaaggctttctatcagatgatgaagataagccgtccggtcttttctctttttcatggctatgtatgaagcgtaataatcccctaaatcaatattgaatatcgtgctaaggaaattcatcatttcttttatctccacattgccattgtttatgtcgcccgaagacacaagcgaatatcccagttcgataagatatgcctttttgcctgtaaagcggaacggatatttgaagcatttctgtaaattgtcttctatctgattattagttcccagtttcaccagtcgtttattcagatagatgcgtagcatttcattggcgataatctttgccactttataatcatatccggttgagaaattagggtctttgtcaaactgtgcgctatcagtacataaccgcaaatcagctttcccacgtacaaagtaatattcatcgtacacagtggaatgtgaacggtaatattggtaaaagtccaaattgcgattgaagaaataggtcagattatccagttcccgattgatgtaatttctaatcgcttcatcactaccattggggcattgtgtttctattcgataaatcttgtaaaagaataataaccgggcaagtatttccggtttctgtgtcttaaagaatagtatttcatcctctttggttaaaaatatatagttttgaactttaattctcaaatcattaagaaccgtctgtagtcgatgtaccattgacaaagaagtatcgataatatcatagccgtagaggtcgatttctgatatatcaacctctatttgctctaatatcttatctacttcttctttcattgtataagtagttcagttcattcaatcactgttcttttgatatataaggaggataatcgtctttagacaatcttttttccaatgtgtcaggggatatatcccaaagcgttggcaaatattcaaatatgactttcccgttatcaagataaaaacgaactttggagtgaaaggcgacaggtttatatttatcttctcctatgggattatctctatatagcagctgattttcttgccattttaattctttcccgtcaaaagtcacatcaaatatcccacaaactacagcttccattgtggaatcttgaactgttgttgaaacacaacgcatataacctgtaatttgctttgtgcttttccgcattgccaattcataacaaaacacacttgttcctgtgtaatctttggctatggtggttcttgctcctttagcatccaaattgtaaaccagttcttgggtgacagttgtcatattgaacttaaagccgttttctgttgtcaccaaatttgagaatgtcattttgtcgctatacacgccttccaagtttccgttctctaatttataaactgcaccagtaagcaatgttttgccaatgatattctctcttaaaaattgaattatttcgtttttcattttatcttttgttttgcttcaataggtaaataaatttctgttaccaattcttccgtgttggttttatcgggagtattgggttatattataacacgatgcgctcaaatttcctgtctatccacaagactgcttcttccgtatggaaacaaagaatgcaataatccgggtcgtttacaccttgcgggaaatagtgcagcatatagtcttgccaaaaggtctgacgggtttccgtatcagtaagtatttctatttttccggttagagtaacactgtctgcttcgtgaacaaagcaaaccccggcttttgaattttgtctgatatgttttaccttttctgtggataaggctgttgtcatccataaagttgatataccggtatggcgcaataggtcgatagctaccgggcggggataaccattttcactgatagtggaaagtgtgatgtagccgcattgttcaagcacccattctgcctgctgccggataggcatccagcgtttgagcgtaggcaggaacttgcgcagtccttcgatagcttcttctttggtaaaattgcatcccgattctttgttaaatgctgccagactttcaggttgggtattcagttcgatttgtttctccaatgagtggttggtgaaaaatcctttttggaagcagtggcagcaatattcggtacacaaacatccgttaccatgagttcctaacaaatcatcagtgggcatagacataccacaactttggcaaattctctgtttcatactgttctgttttaattgggttggtaaaattaactgtaaattagacaatcacgttctcgcattaaggtattcggataaggacggtatcgaataaaacacatttttagggttactgctttctaaggctgtcacttcattttgcggaatactccaagcggcagacaggcacatcacattggctttcctgcactccgttatatctgaaagcgcatccccgacatatacaatttcatttgcagccaaatgataatcatgcaagagttctttcaatgcttccgacttgatgttcctttcagcgtttcccgtaatgacctttgcaaaacaaatcttcatcttgaattgctttagcgttatatcacaactgtttatcccttttccagttataagcaccacaatgatatccttttgctttaacaaggctatcaactcacgtattccctcaaaaggtgtcggacacatttcctgatgcagttccttataaatcacataaaaattatgtaatgcctgttgccgatagggtttatcaacgacacacccaatcatgccttcttcattcagaccaaaagtatgaaccacttctttgtccgacaattcatgtctgatatatggttgtgtggcttttttgaaagcctgtatgcacatcggcaaggtattgcctatcgtgccgtctaaatcgaaagcgactaatttaatcatggctatatggaagtattgatttcccgaattactttacatggatttcctacggcaaggctgtttgccggaatggatttggtgacaacacttcccgctccaataacgcttccccgaccgatagtaacccccggcaggataatgacactaccgccaatccaacaaccgtcctcaatggtaacaggcagggcatacgtgtgacggatatattctattccgttttctgcttctatcggtgttaatcgctcattcagttcaatagggtgagtagccgtatagatttgcacattgggagctatcaacacattattgcctatgatgattttgttgcaatccacaaaagtgcatccagtatttatactgacattattgcctatgctgatattgcaaccatagtcgcatataaaagaatgtcccactgaaactttcttgccaatgctttcaaacatttcttttaatatcgcatacttttcttccttacattcatacggcaaagaattgtatttcaacaataattcatgtgttcttcgtttgaactccctaaacacaggggcatggcaatcgtaccattcacctgataagcacttttctaattccgttttcatacccaatcatgataaaagttactactttattttatttatggcaaagttatacacattcatgcgtaaatatatgtattatttttctatttatttgtacctttacgcctaaatagcagaatagataaaatgaaaagggaaaatctacatcaaccgtttgaaatctgtttcagtgaactggacgaatcacaattaaaggaacacgaccacaccttttttgaactggtgtatattctatcgggaacaggtattcaatggataaacaacaataaatttccgtaccatgacggacatcttttcatgattacccccggagatatacattctttcgacattcacactaccacaaagtttgtatatataaaattcaatgacatctacattcattcggctgtttttggagcagaaaacatacaacggttagaatttatactgcaacacgctaatcaccgtcccggttgcatcttgcgcaatcaaactgacaaattgctggttaaacctatgatagaagcgattatccgtgaatatgtgaatagaaacatatacagcagtgaaattatcacgcagttaatcaatacgattgttatagttgtcgctcgtaacattgccatgttcttacccgaacagatagatgagaactcagaagaaaagtcactgaatatcttgcaatacattcagtccaacatttgttatcccgaaaaaataaaagccaaagctataagtcaacattttggcatttctcctaattatcttgggaaatacttcaaaaagcagactaatgaaaccatgcagcaatatatcttagactataaaatgaaaatggtagaaagtcggcttttgcacagcgaaatgaggattaacgaaatagtagaggaattgggctttacggatgaaagccatttgaatagactattcaagaaatacaaagattgcaatcctactgattttagaaagaaatatcgaaagtcataaagctatttttctaagtacaagacagcgtaaaactgcatcatgcattattttagccttacatttatcaacctagtaataagtatcgtataatattctattctctaataagcataaagctagaataattttacatttgccataagatacataggtgcaaatctttgtctatacaagctttaaatttccctgattttatataaaaacaattaataaatctagtattataatcaatttagtgcttctttatttcttgcacacccaaactctaataatttttcacctattttattccactctcgttcttgaaaatttaacaaaacaaaattttccgaactatttttcaaatcctcttctattaaattgaatatgcgagaaagaggaggatatacataatcactatcgcaaagattattgtaatatatgtcaaaatcattaatatcaggattacaatcacagcattgctttgcaaattccttgtaggaagaatcgttttccgtatcttttttccttataccttttttaatatcaaaatattgcaataaattcggatttcgagaacgtaaataatcgaatttttctttcttggatgcatgttctccagaaaaagatttattatcaagaagattaaaaggcatcaaattttcaatttcttgaacatctaatgcaataagtttaaagctccccttttcttttcttaaatatttccggcacttattgtatgtgtcacctgtcggagaatttggatattttctatctgtgtctatgatagataataatattctcttattttcaatatgattatctattgatctacatatgtttactccacctccattatctgtatcaaagttataattaatattcagagcatttttgcttatataccattttaatatataagtaaaaaaattgcaatcattaaaatcttctcctaaaagaatagacgcttggcagcataaagtatcttgaaaatcatttattgaagactgaaaaatttcaacatcaccttctattcttcttggattagaaatactaataacaatttctgttcttcgttttacaaaatcaaaagatgtcgaataataattattttctaaggtattgaatagactatacaaatcaaaatcccctttaaattcttctttaaaatattttaaaacttccaaactgccagagagtaaatgcttagactcaaacacagaggttgcaatatgctttatggccctcacaataacaattttcatactatgagaactatcaaccattaattcatcagacaaaacaaataacatatttataaatctataggatcaaaaaaaccataaggccaattctttatttgcccattatctttgtagcaagtctgcgttattattgagttcttaccttctttatctttttcaaaaatgataaggccaatttcgtcttttcctataaaattttctgatattcttctcccaattctatttataagcgattgactatgagtttctataaataatttaatatcgatattattttcttttcctttttttattgctttaataaaagcatctgctatttttgcttgcattgcaggatgcaaatgcagttcgggttgttcaattaccacacatcttttagcatcttcctcataaggtctcttttgtgtaatgtaccaaagttttgttatgattggcaatatttgtgaataaccaaatcctacgtctgcaagattaaattttccatttttgttttgcaagtatatactttgatgtccagttgtattagctactccaatactaatacctagtatttcttgtgtaaaggaagaatagctctcatattgtttatctgttaatgatgctataaactcctgcaaattgcgtccatacgcatcaacatcctttacttgcaactcttgatttctataatatctagacgcttcagcacgactaggtgcaatataactacagccactataaaaccctttaagttcttcatctataatccatagcaataatggtatctgagaagtaatccataggtaataaacttcttgaaatgtttcattatatatgtcccaatcagccgttttcctttgcaaagaaataatctccgtattttttattgatttcaaaagagattcttttgaactatccaacaaattgaataaagactctattcgaacttgctttttcaatcttttatcacaaaattgaattaatttatttacagctaaatttaaagtttgcacttgaaaatcttcattgtcctttcctataaatgtaggcatcaaaccatgatttgtggtaaagctccacttgttttttacaccgtaatttgtcatgtcaattttcccattaataagaatcttaactggtgaattacgactatcaacactcatatctataacaaaacttttcaattctaatatgacacgatccatatatgtccccttaacatcattattaagagaaatagtaactcctatattagagttttcttctttagtgagattgtaaagattataataattaatatatctatatcgaaaatttaccctaattctatttcgtctcacttgatccaatttgaaagaaaaacgaatagtttctttttccgacacaaatttattttttgctgttacataatctccaaaatccacagatgctacatcaaaccacgaaacaggccctcttagacttttatttatagattggcttaggagaggaaagctccttaagaaagtactttttcctgaagaatttgcaccaactaagatattcaatgatttcaaatcaataaactttgaatcttgaatacttctaagattttcaattcttattgcgtttaacataaaaacttatttttggattgtgattacaaaaatacaaagaatataacaaataaactatttatttgctatttaaatatttagtgcaaggtgcaagcatatatttatatatagcttgcaccttgcactaaccgcagaagatttattttcaatgatttgcgtgtttgaaaataaagtggtatctttgaaccgaagataaaggcagacacaatcccgaaaagggaagtcaaatgctctttgaagaaagtgcctaattcgtaccccttaaaagattgaggtacgctaaaatattgattttaagacttgtgagccgtatggttcaagacccaggcggatcactgaaaacaaaagaaaaatcaagcaaatccctgataatcaggcattatcagggatttttattttccccaaatactgcatttcaccgcaaaaaacagtgatgatcacaggtgaaataggtggacttgacatctacctgaaaaagtccaccgaattagatcatatttcattgattttccgaattttgcgtggttcgaaaccgactcgtaaaaattaattttgtaacatcatttttttgagtatggctatgcagagaaactactttacgattcttttcttcatcaagaagtctaaactcctaaaaaacggagaggcacccatttgtatgcgtataacggttaacgggcaacgggccgagatacagattaaaagaagcgtggacatttccaagtggaattcccaaaaggaatgtgccataggtaaggaaaggaaatctatggagttgaaccattatctggatacggtccgtatgaaagttttacagatccacagggaactggagcaggacgggaagccgatcacggccgatgtcttaaaaagacgttattacggggagggggactctccgaagatgctactggaggttttccgggaacataaccgaaagtacagggagttgatgggcaaggattatgtcgccgggactgtcctgcgctatgaacggaccgcgaagtatctgggtgaactgctgcaaaaggaatacaggatgaacgatatacctttgaaagagataaaccatgagttcatcgcccggtttgagcactatataaaaacagaaaaatcatgtgcccagaatgccacggtaaaatatctgaaaaacttcaagaagataataaaaatggcgcttgtgaacaaatggataacggacgatccttttctggagattcattttaaacaaacaaaaacgaaccgggcgttccttacggaagaggaattgaacatacttctgaaaaaggaattcaccattccccgcctgcaaacggtcagggacatattcgtgttttgtgcgctgaccgggctagcctttaccgatgtacagcacttgcgatatgaacacataataaaggatgtcaatggcgagtactggataagaaaagcccgggaaaagacggacaacatgtgtgacattccactgttggacattccacggatgattttggagaagtacaagacacatccggaatgcctgaaaaaaggagtggtcttgccggtacccagtaaccagcggatgaacagttatttgaaagagatcgctgacatatgcggtatcaataaaccactgagcacgcacgtaaggaaacatagtaaaatttatatctaactaataaacagctatttataatatactattctatttataggtaacgatttagaaacgagcgaattactatattcagttttcttttgcattaatcaaagaacgattttaacgctgcaaatatacatttagccagcgatacaagcaagtatttcccgccgcataaatatctcaaaacctgctatggacgaaggagggctgatttcacgtctcccctatccaatgagtaaagcactttccttccggcaaaaagcggcattacatcccccttttttatatttagtcatcataagattcttattctctgaaatacaatgttttgcgtaaacaggcaagtgattgtatctgataattttgcatcctgtaaaattttaaatcagagagtttatggctacagtaaaaattaaattcagaccttcctctgtggatggcagagagggaacggtttattatcaagtgattcacgggcgtgtggcaagacagatcaacacttcctataagttgtttcctgccgagtgggataaacgtcattcccggattgtcatcatttcgccggataaggacagacaacaatatctcttgtcattagataaaaaaataacggaagatattgaccggctggagaatgtcatcactgtcttggaacggaagggaggtgctttcactgccgatggcgtaacttccgcctttcacggcgagcatcgcgggcttttctttcttgtttttatgcgggaagtaataaatggcctgaagtatcagggaaaagtacgaaccgttgagacctataactccgcgctcaacagtttcatgcgatttatgggtgggaaggacgtgccgctcagggatatggatttcgatctgataattgcatacgaagcatggctgaagtctaaagaaatctccatgaacacgatatccttttacatgcgtattttgcgtgcgacctacaaccgtgccgtagagaaggaactcgtcacccagcgttttcccttcaaatatgtctatacgggagtcgagaggacaacgaagcgggccgttccactgcgtgtgatgaaacagctccgaatgttggacctgtcaatttatccggctaaaagatttgcgagggacatgctgcttttcagtttttatacaagggggatgtccatggtcgatatggcattcttaaggaagaaggatcttgataacagtatccttacataccggcggaaaaaaaccgggcagcgactttttgtaaaatgggagccatgtatgcaggagatcgtggaccgttacaatattcctgagtctccatatcttctccccatcatcgtcaaatcaggtgtagacgagagaaaacaatatatcaatgcctcccatcgtatcaacagacatttgaaaactataggaaaagaattaggcttatccgttcctttaactcattacgtagcgcgccattcctgggccagcgcagcccggagtaagaatattccgatctctgtaattagtgaaggtatggggcatgactcggaaaccactacaaggatctatctggcctcattggatactgccactatagataaagcgaacagtctgattctaaaatccttgtgcagagagtagcatattgggcgaatgtacctctcttgaaaagagaggtacaaaaaagaaatatcctaaataagggatacttgttcaaggaatgatcttagatatgggaatgtttaaggatgataataatgttgagcaaaaattatggtctcttcataagagatgagtaatacgatatatatgaacaaaatagcctgataataaggggcttgatttttattagttcctgtttgctcaacaaattgttttgctgtttcaagaatcattccattctgtattatctttttttgctcatttttgtaatcgttttcaatattttatgtaattttgcgtcgcattattcatctcttatgaagagaggtacatttaccatagggaattgtggagcaaatatgcctaaatcatgggaaggctgcttgtaagaagttgaaggtattttgtaaaatactataatgttttttatagaagtatatactctccacaaaataaacaaatgatgctttttctcctagagatgtattgataaattatatacaaatatggaatcaatatgaaagcgagaaaaatcttacttgtattcctgatattttatgtaggccacattcaggcacaagagatacaggattcggtaaaaatctatttcagacaagggtattccgtattggaaccatcccgtagaaataacaaagaagcgttagaccggattgcggacagtctacggacaagctatgcggattccgtttatcaattgaaacgtattcaggtagtaggtggtgcatccccggaaggtagtatccctctgaatagacgtttgtcagtaaagcgtgccaatgtgttgttcaattacctttcacgctatggagaattacctgattctttgaaaactaatgtgttcctcggaagagactggaatggtctgatccgtcttgtgagcgatgacaggaatctgccataccggaaagaaacgctacatttattgcatgaactggcagaggatgcggcaaatgacgatctttcgaaaggtgaccagctgcggcggatacagcaactgcgtggtggagtgccctattggtatatgtataaaaaacatttcccggaattgcgtgcctcccggttgtatctatggtataagaaagtatggaatcctatcgctcctatgtcaatgcctcccattgaactgcctgtacccgagcccgaaccggcaggacctctaccctttgtcccatatatgcctccgcagccacggaacctgtattttgctgtgaagacaaatatgttgtatgatgcattgctcgtaccgaatatcggtgtggagttttatcttggcaaagactggagcgtaggtgccaactggatgtatgcctggtggaaaacagatcggcgacactggtattggaggacttatggtggtgatatggtcattcgtaaatggctcggtaaagccgccaaggaaaagcctcttaccggacatcatctgggcctatacgggcagatttttacttatgattttgagacaggaggaaaaggctatatgggggggaaacccggagggacgctttgggacaaaatgaactattccgccggtgtggaatacggttattcgctgccggtggcatataggttgaatattgactttactattgccgtcgggtattggggaggaacctattacgaatatactcccgtagacaactgttacgtatggcaggctaccaaggaacggcactggtttggccctactaaggcggaaatatcgctggtatggctgattggcagagaaaatttcaacaaagggaaaggaggcagacgatgaaaaccggcatacgagtgactgtttatgcgctgttggccatgattcttttctcatgcgagcacaaggaactttgcttccatcatccgcatatggttacgctcagagtggattttgactggaagaacgccccgcaagccgatccggaaggaatgtgtgtgtatttctatcctgaagagggtgaatctccgattcggttcgattttgcggggaaagacggagggtcggtagagattaaagagggaagataccggatactctgttataataatgacacggagtctttactgttcagaggaatggaaggatttgacacccatgagggatatacgcgggatggcaacgtgtttgagagcatttatgggaacggtgcccattatgcgcctccggctaaaggttcggaagacgagcgtgtcgttatctgccctgacatgatgtggggaagttgcgcccgaaatgtggaaattaccgaattaggactaagttacgaatgtatttcttttgcggacaaagacaaggtcgaatggatagagagtagcgagcatgtcattacgctttatccagctgaattgatatgtacctatacttatgaggtccgtaatgtcaagaacatggaatatatgacgcaagcctgcgggtcattgtcgagcatggctccctccatgctgtttgccaacgaagaactggacagggagtgtgttactgttccctttgagacagagctccacctcgagagctcgaaaatgaccggtaaattctacacgttcggtcatcacgaagagaatgcccgtccgcacaaaatgatgttttatgtatggtattccaataaggaaaaattctatacaacctttgacgtgaccgaccaagtgcataaggctccggatagaaagcatgtacatatcatcattgataatgcgggcttcccagaaccgcttccgaacgaggatggatttgatgtagaggttgatgattgggtggaagtagaaaatgatattattatgtagtctttatatttttaatctttttgatattatgcaagcgaaatcaattctgatggtactatcggccatggcattggtaacggcatgtgccaacgacgaaacgatagaaataaactatggtgaaagcatcagcttgagtgcggtagcgggaaaaacaacccgtacaggaagcgaagccaccacaaccaacagtataagaaactttcatgtattggcctttacccaaggagctacatacatggattgcgatgtgcggaagcaaggaaatgtatggtcgtatggcgataccaagttctggccggaaacagatgtggacttctattcgtatagtccgatgaatacgcagaatggcaatgttagcatcaaggttgaaggcgacaagaaaattgcaaactataacgtacccggcgatgaagacctgctttatgccttgaaccaggctgaaaagaaaaacgagcatgagggtgaacgaccagtcatggtcaacttccgccatgccctgtcacaaattgtattcagaatcaggaataccagctctaacctgacagtgttcgtagacgcagtgaaagtggagggaatagagaaacagggtacattcttctggccgactttgagcactactactcaatggcagggaactgagaaagacacggaaactgacaactcatggggaagatggaatattgtgtataacaaagagaacgcaaagcagaacaactatgccgctgagattattccgataatggaacaaggttttgtaggttccatagatgcatctgtgcgggacttgactgttaaaacagacaatggctataagggattgctccttttaccgcagacattgaatccctggattacgaagaccggcggaacagatgaaaatccggagtacaaaatcacggggacagcgcgagtgcttgttaaatgcaagctggtggatacggtatctaatgtacagttgtggccgaacacgaactcacacgaggaaaccgcatgggtgggtgtctccctggtaggagaacccaaagacataaacggaaaaaccaaacaagtctggaagcaaggcaaacgctatgtttatactcttatctttggtgagggtggcggctttaaccctgatccagatcctgaaaatccagatccagaacctgtattggttcctattacattcgccgtaactgtggatgatttcgttgaatatcctcaggacctcgatgccagtgttcctaattcaaactctggacaataacactgaacaaccgcagacttgtcttttccatttatcaagttgtggaaatataataagccgggcggggttgaatgttcccttcccggttactatttattgtacaaaaaataaatgcctatgcgacttaatttaaaaaaggatttccttcttgtcacgaccatgctggtcgctgtcggctgttccgatagcatgacggaagaaagcgattcggagcaacggataccgattgtctttggcacacaagttgccactcgtgcagtggtggaaaataacaaggagggtatggataatttcacattgtggggatgggtacgggaaagcgacggaccgaaattgtttttcgatgctgttccggttactccatcgggaaactatggcgagaaacgtttttgggctgtaggtaggccttatggcttttatgcggtgcatccggaaaagatgaaagagaataatattgccacagaggtctcctgcaacgataaaggtgaacttagggttacggggtttgattcttccgagatggggaagggtgctgtggatctgatgacagcagcaaagacggatgtggtttatgaggggggcggaatgatggcgcctgtgcttttggcattcaaacatgaattggcacaggtgaaatttactgtctgtacaggggagaagcaggcggaagtgtcggacatcagacttttgggggtggactataaaggtgacttgctgtggacaccggaggagtcgacatggcaaaaccggataaactgcacggaagaaggaacccctttcgtacgcagcgagagcgtgcggatagaagctggaagcagtgttaccgtgctggatagcgtattgctgttgccgcagccggtgacggagcatgtggcggtaacctttaagtatgcctatgccggcaaaccgttgtcggaggcaaaagaagcgatggtatacctggatgtggctcaaacaacggaatggataaagtcgagcacttaccattataaaataacgctgcctgctggcgatgccgatatcactgtcaaagtgagcgtgggagattgggacagccgggatatttcggcagattggtaatctcataaacaggaaatagcaagatatgaaaattcgaaaatactcatatatattatgtatgtttgccgcaatggtggggataatgacggcttgtgcatcggacgaacaggaggagatgtttcccggagagggagaaccggtgacggtgaagctttcaattgatacaagggcggcaggagcggatgatttcgaatcgcaggtgaagacactcagagtgtatgcttttcacaacggtagtctggtagggtattattatggtggtgaggatgtgcaaccccatactttcaaatggaagctgccacaaggagaagtctggttttatgcggtggccaatgaacaagcggcaggaaagctgcttagcgaaaacaagggagacatttttgtactgcccggtgagactgtcgggggagtacgtccggtcgaaggcttggaagttgcgccggacagactggagtctttgactttcagccggctgccggaagcggaatatatgtcgggcggaacggaaacagacaaggatgaaacgggaaaaaaataccgctctgccattgtgccgatgacctgtaagtatcgtggaacagttacgcacgataatcaggagataaacctggaactgaaacgcagcatagcgaaactacagctttactttgccaaggcggatgtggcagacgccggagaggggcagctctatatggggcgcgggttgtatctctacaatatgccggaatacgggtatctgtttccgaaagagaagtacgaatatacgggagatttcaattgtctggagggagccggtgaaagttccgactcgaagaatcagaagaacggcaaggtaattctgagtgcgggatggccggaggaaccggaaaccgctccgcaagaagggacaccggaatatgaggtgtatgaaaagaacttgctggagaagacccatatcaacgagattaaggctttggcacatgccgggaatacaggcacgaaaaactttcagtggatgccagccaaaccgatttatctgtttgccaactccaatgaaattgcagaccgttatcctgagaatccgtcagcagagagttcaaggggatattatctgaaaatactgtcgcatgaacataaagtgggaagtgacggtacggaaggccatgaggctgatatgcaatatgtggctttgcccgaagtggaagccaacatgaacctgcggctgttttccgttatttccatgcatggacacgtggctatgacagcacattggatgattgttccgtgggaagctggaggcggagatgtggaatttaattaggcagacgaataacagataaaaatatacagcatgatgaaaaaaacagtgaatcatattctggcggcgggactgttggcgctcctgtcgcttgcatcttgcaccgatgagttcatcgaaggaaacgacttgcagggagtagaccgtgacaagcgggtggaggtgaggcttccgttcggtgtgggacgtggcatcactaccacgattacaacccgtgcggcaggtggagagattgattatgactcccagctttcgggcgtgatggcttttgtatatgaagcgaagagcgacaatccggaagaaaatgagttgttagcctatcatctgttctccaatccgtccaataagccgctggaaggcgctaccggcggatggattgccgataatgacgaccctacgtgcggtgaaatcaagttctatgttccggtgggcgatgtgtatatctatctgttgggcaatgcgcaaagttcgttccttaatttctttccgggagtatcgggtggggatgcgctgggcactcaggcggagttttttgaaaaagcaaccccgaagtggaacggaaacatacacagcgtagacggttatctgccgcttacgggtatggtgaacaacaatacaggattatgtcatgtgaacgaacagggacaaatcagttatacggatgaagagggaaaaactcatacgctgttgccggacggtaaacacgatgaagacaactcgtttgtgctgaaacgcctgatgagcaagattacaatgaatatcagggaaggtaaaggagtgaagtttacggcgcgagattacacggttcgccatatacctcattatgtgtcgcccaccgcacaggcgtggacggaagaagagcgggaccgtatcctggtggaagatgccaagccggtgaatttcggtttactggattctctcacttttactatatacctgccggagaacatacgcaaggtaagatccggcgtggagattaccgaatacaggcagcgggataaggtggtgaagactgccgacaataaaaatacggaagagaccgctcccgatgattttcatgctgataatgccgataatcacaaagggcactacaagtttgagtttgctccgaaagcttctacttatattgaactgaccggatggtttgaaaatgcagacaagacggttgctgccgatgtccgttattatatccatttgggtaatttcgggaaagacctcaatcacttcagcgtggagcgcgaccatcactatacgtataatgtaaccatcaacggagtggatgatatagtggtggaagtggaagatgagaacgaaaagactccgggagcggaaggagtggtgttcaagcatgaggctttcgcacatatcgatgcccattttgaccaggtggagatgaaattcatgcggaaagacattgagaatggtgtctatctgtataccgacacacctttcggggtcatgggggtgatgtattatcctaaaggtacccccagcggaggtacggaaggcaaatgtgtatccgtgagcagtttcggtattaccaaagaggtggcacaaggctatctggcgtggctggagtttgcgaaagagacgcaaaaggataactatttctataatggaacaaaaccggataaggaaagcccctatctcctggaatactattatccaggcaaggtgaaaagtgtgttcgatgcgctcgatgagttttatgcaagtaaggaggattcggcgtactacacctgctttgtggatgagaacttttatgaaagacatcccgacccgcgcattacggtaccggtgcatctgaaagattttatcaactgcaaggaccgtatcttctcgcttgctaccgacctcgagttcagccaagatggtaagagcgcggtgtcgcagtcggtttatacgctgaaacaacgttccattgcctgcttctatgatatgaacgatgagactctcaataaattcggcttggagtcggtggaagagcagaagcacatcctgtatgagccagaaccgggcgagagggaagtttgggacggcagaaagaatacttggcaaaagctggatggtcaggttggaaattgtaatatgcatggtatggaatgggggcttaaaaaatcacctttcctatccggttttatactgaggaaagatggaagtctgaaggaatcccgaccgattagcggacaggccgacgatccggttatcatgctgatacgtaaccgtgatttgaacggcaacggctatctggacgaggaagaactgcgctggtatgtacctgccatagggcaattggtgggtatgtggctgggagagcctgccatggcaaaagaagctgccttgtggaaatcgtctttcgatatatatataggagcagacgggaaaaagataaacaaggatcccgtacagggatatacggccagtacatacggtccttattccacaatatggtcggaactgggaggatacataagtcatacgtatctgaggcacatgattagtgtgaggagcttgggaagcggagtcgtgagtggcaggatggacagggaagtttcgtctccttattacaaatacgatgaagcaagccgtacactggaagtctttttggcggacgaagccatgcgctcgttcagttaccgggagcttcagccccataacgaacgcgatacgcagaaccgtctgtacaagaaattccagctggcacaagaacccatgctgatggatacgattgcgaaatttgagtgcactgacccgagtcacctgagatttgataaagatactcccagtaaggtaacatggacaggtacgacattgaaacttattgagatagacaatgccaaacgagataagtttaccatagcccaagactatcacgaagcaggagacggagtgacccccgccggagcgtggcgcttgcccaatgaacgcgagctgacattgattcagctggcattcaacttcttccaggatgaggacaacctgcctttctcgcccatggtgaagccgggagacaaggatgccgtaggtgatgcttacggctggtacaacccactcagtctgacatgcgatttaagtgataaaaggaagcataattttaagcaccggctttgcgccatgttccattgccgtacggcgtattcttacagccgctattatcccggtagacacgaatatacgcctaccggctacatactgaactattggaagaccgattcggaaatggagttgctgaaaattcgccgggtagaaatgcacatgatgccctactattcagattggagaggcatggtggaggataccgatgaagatcgggaaaaatacggcagagccggtgtgttctgtgtgcgcgatgtgagatactgatccgtaggaatgaccggatagttttccatttttccgtttaggcgaatcttatttaggggaacacctaaggatacaaacaagccggctaattcaaatatttttagaatgaattggctggcttgttttttgtcatttaacatgaattcgatataagaaagtgttttgattgttttataaacaaccaattttgttattttcctgttgttttcgtctatgttttgagcgttttggaggcatattcgcttctcttatccagatagcttgctatctttctcatcagagaaatgaatctggtccaaaaacagatccccaatcaagaggcagaaaaatcaaaacagtttctttgtcaatattatataaatacatatttttatatagacattaaaataaggttatttgccttatccacaacagatgtatctaaagagctaagataaattcgggtggtttgttccgaattatgtcccaatgctttactgatgacagatagagggacatttttactttgggcaatactggcccatgcatggcgcgcgacataagtagtaagcgggatatccaaaccaatcagcttgccaatctgcttcagatttctattgatacgatgagccgcattctggtattgatgccactcgtccacaccattgtttcgaataaccggtagcaaatagggtgtatcaaaggtatcatatttatcgatgagttcctgcatggttttttcccttttgataaataactgctgacctgtcttatttctccgataagcaagaatcccattttgcaggtcttgcttttttaaaaatgccatatctacaaaggacattccacgtgtataaaagctgaataaaaagatatccctggcgaagaccagtgattttttcgtcaattttaaatctcgtatttcccggatcacatccaaagaaacagcacgtttctttgttttatcaataccggtatatacatgcttgaaaggattttgctgggtaacaaaaccctgttccaccgcacggttatagatagctctgagattacgcatataataggaactggtatttggacaaataccggttcctttaagccaactttcataggctatcatcagattggagtccatggcttccaacgggatgtctgcttggtcattcaaaaagcgttcaaaactgcccaaggcgttccgataggtatcggcagtacgtacttttcctattttcttcaattcaaccaacaatcctttcccatacaaaagaaaggtataacttccttcatgagtagagtaaagttttacgatgcggtcggctgtataagttttattttcctgtttcaaacggttgatacattcttttattttgaacagatctgtatcaatgtgctttttcaatgctgtcagatagagtcttcgctcttcattctttccagccgaaacatttattcgtttcaaaactgtattccactcgttcgggaatagcctataaccggtacgaagtttccgtacctcacgatgatggattatttgataatgtagagtcccttctttttggatggtagaagacgggcggaattttacttttatactagtcatatgcattcagatttaaattttatatagagtttataaacagacgaactaaccacatgcgtttcaatctgttttgtgatttcagatgaattatagttagatatgcaaaaagcgactccggagtttttacagggatggtttggcggagttttcgccgttaaaccgtccggttttcgttaaacgaaaaaacaagactacaaaacagaagaagaaagcataacggtgtaactgattcatttacagaaatgaaagtcttttatagtcctttcctgtccgacattggtttggcagaataaagcggataaaggcaaacgttccgtttcttatccgttacccatttcagggagtgaaaagcggtgcagaacgttgtccgaaaatgaccgggaaagtccttatttgtctgtgtttcacattgttctaaaactcacgaaagcagtaattttacaaacttaaaaatgagtgattatgaacaacgaactgaaagtgtccttttacatcaaaagggaaaagagcgcaaccaacgcctgcggcatttatccggtgattggcaaaatcattgtcggcggtacgttagctcagttcagcagcaagctgaaagtcgatgaacgcctgtgggatgtcaagtcaggacgtgcgaccggaaagagcaggcaagccgttgagctgaaccgggcgataaacaggataaaccttgccattcatgccagctacaaggacatcttgaagcggacgggcaaagtcacagccgtggaggtaaagaacgcctttcagggtgtcgcaaccgcacagacgactgtcattgccctgtttgaggaaatgatgcgggatttcaaggcgaggacgggcatagaccgggcggaatcgacttacaagcagtacgaggtgctgcacgaccaactgaaagacttcctgaaaatacagtaccacgcaagcgacataccgtttacagaactggacttgcctttcatcgaatctttggacttctatttcagggtaaggcgcaaaatgaaagcaagaaccgtcaaatcaaggctcgtgctgtttaacaaagtcgtcctgctgggatagtaaaaagaaagagaatttgaaagctgaaatcagcaatttgataaatacataagactatgcacatagactttgcctcgccatcgaacggaacatataacaatgcaggcagtagccgacagttggcaaattacctcgaacatgaggatttagaaaggatagaaaagggtatctataccgaaggatttttcaatctgacagataataatatctataaatcaaaggtcataaaggatatagatacaaatatcggccaactcctaaaaacagatgccaagttttatgctatccatgtcagcccatcggaaaaggagcttcaagtgatgggtaacacagagcagaagcaagccgaaactatgaaacgttatattcgtcaagtgtttatacctgaatatgctaagaacttcaataaagaactatccgcttcggatataaagttctatggtaagattcattttgaccgtagtcgttcggaaaatgaactgaatatgcactgccatttgattgtgagccggaaagaccaagccaataaaaagaagctatcaccattgactaatcataagaacaccaagaatggagcaataacaggtggctttgaccgtgtgaatctgttccagcagacagaacagggatttgataaactgttcggttataaccgacaacaatccgaatcgtttgattaccataacacaatgaagaacggttctatcttcgaacaacttgatttacaggcacaaacctttattggcgaaaagaaaaaagatacattccaacccagtgaaaaagaaaacaatatttcttgcaatcttgatagcaagatacagaacaaacattcttacaatcaacaaaataacaatggcggtgattctttgttatctatcttttcgttaggtgatggcaacagttataatgctatacaagcagaggaattacaaacacagagacgcaagaagaaaaaaaagaaaagacgtcagctgtaattctgtactctaataagtaaaatgataaaattatagcttatatacttaattaaaccaataaaatttctttttactacataatatgaacgtccatactatttgaaaaacgaagtgatcaacaagttcttaactgtttatgctcaacctcttgttttttacatttcttttattatatttgcagaataaccaataaatttaattcaaatggacaaatatactcacaaaaatcaaaaagaacaatcaaagaaaatcagattgtacaatatcgctatctacccagaagagtgtcaatccccagaaagatacactgagttatttaaagcagtaaaagaaaaaaaatccgtataaacacatattcagataaaaatacaaggataaggactttgtatgagcatgatggattaatctatggttcattaattaactatacaaaactaaatgaagaagggtggtttaatgaggaaacagaagaaattgaagatgtaaatatcaatcctaatctaaatcccaactcaaaagaatgggaatatttcttcttgccacaagcacatcgtttagcaatatttgaagatgccaatacatcttcatcccaaatagcctatttttttgaagatgcattaaataaagttacagataagaacaaaggtgagaatgtaaaagttaatattgtagcaacagaggatgctattgaaaagatctttaatgcagtgcaattaaccaatttagaaatcaaagtatcatatacaaacaatgataataatgatgaatgggaagccatcatagacgagcaaatgaaagaaagcgaagtatctgtcgtttcaacaaaagtatcagggaccaaaaagaaacctataaaattaaagaaaaaaacttttttaggtggtatgttgaaacttagtagggaaaacggatatgccaaagctaccgcatattttgatgggaaacgagatgttattaacacgaaagagcatcctttaattgatgaggttcgatatgaaaatgaagattctctgttagataaaataaagagtcgtatattatcattatcaaaaagacatgagtgataaaaaaagtacaggctggaaaatagtatgggaaatataccctttctgcaatttatgtaaaggatgtattaagcctataatattaacagccttaacactaattccacttctattttcaaaaaaaacaccttttgaacacatagaaatagtaagcactttaatcacaagtgcttttcctagtattataggatttgtgctaacaggatatgctcttattattggatttagtagttccgaaataataagttatttggcgaaagacagaaatgagaaaaaatattcactatttcaaattgtaaattcaacatttgctatagtaatgggtgctattatttgcacttttttatatgggactttttgtcaattcattcaaaaggcacaagtaccattcctatttggcaaaggatttgattgttttaattacttagtccttttcttattgcttttttctctctattattctatttgctcattattagacatcgttattaatattttcaacttgggtcaatttgcaaatactcttgcgaaaagaaagtatcaagagaatgaaaataaaaaaaacatcactgtaaagaagaaaagtttttttgagaaaataatagattgcctttttacaaagaaaacacatgattaaaaataaaactttatcatgcctattatttgtaatatataaagccttaaagattgccttgcaatttttgcaaagtatcagaaattttctatctttgccctcagtattctccatgagcaaactactgcaaaagcaagtaacaaattagtgggataaatcatgggatatgcttgaagcaagaaatataaagttttaaatatcagcgtggtaactcaacaaggagaatcccaggcggatcacataagaacaaagccaaacggcgacaaaaaagagacaagtcctacaatatcaacgtattgtaggactttttttattgtttcagtcttgcttaaaagacaaaaaaggggcacgaaaagacacggttgagtatccaaatcgtacccccttccccaaaaaacgattagggggtaggtacgattgtcggaaatcactatctatgcagaaggtttcaatctctgtattgattttagatattcctcaaatccgcaactacgcgcctaatatgatacagaagcgaaaagaatctgcatcgttagtaaaaagggggcacagtgcatcgaatgtcaccataaagacatataaatgccccttaccccaccatgcgacttgaggcaatacgcaaaatcacgactataagttgtcggtgttatccaaagtcattctggaacacattggcataagcattgttgcatgaatagatattcagcacatacttccttgatgtcctgacccatttggctggcacagagatgaacttaaagacaaacgtcttgatgcggcttgttgctttgagtccgaacctcttcacgtcaagcctcgccatgatgaatttatagaagttgcgtatgagtgccataagcagaagaaacaccgtgttttctcccataaaggattttggaagcctgttccagccgaatccgttattcatatcatcgaagatgcgttccttccctccacggaggttatagaattcgacaatctctttctcggaagactcgtagtcatttgtaaggatgcagcggtaggtgtattctccttcccacaggtcgagttcgccgtctatccgcttctgtctttgaatcacaagacggtatgccttccctttccatttctcgatgagaatggaggccagctcaaactcaatgccgcccaattccactttcttccaacctctgagggcaaagatgtcattgtagagcgaactgcatcggttagcacggatatagaaggtcttgcagtgtttagcaatctcttccactatctcttcagaacacgagccgcaatcagctctgaaacggttgataataagcttgttttgttcaaacctttcaaagaacctcttcagcgtgtccttctggtggaaacggacatttgtgttgccgtcgctgttctcaatgccgacaatcaagttgccaataaccgccacgccagggcgataaccaaggaacttcttgtatgtaggcttcgcatcaaacttctcagcctctatgaactggtggtcgaagtcaacgtcatacccctcgccctctttcagctgccctgtggacaataggcaattgaggagcagtgtattcagcttgtctgccgtgttgaagtcgtaggtcttgccagtgtcggatgtgtaggaaatgttatcctgggtcagttcctttatggctctaagaatcgtgtcggcactgcatgtgcgaagtgtcggatgaagcgaaaggtggtacatcagatgagtggtgacatcctcgatgcatgagccgccacaaaaataaacgctcataagcgaacggatgatttcgctgtattgataaccatacagcctgcatctcataccgagggttgagtcgattacagatgagagtctggagtcaaattgctccattattgaaaatattcctccaaaaggagtgagtttctcggatttaattgctacctttgccatgtctgtcgggtttgatacatattttgatttgcaacactaagataggtgaaaaatctgacatggcaaattcctgagcaactttttgttgctcaggtacttaaaaagttatatttgtaatagtgttgcggaattaaggatattatcatctgaaacctgttttactgtgatttttttattaatggtggttgaattcagttgtttacttgaatacctttcttccatttaagaatagcaaagcaatacaaaagtcattctgtaaaagtatttcaaagtccaaaacagatacagacacgatttttgtatatttgcaggatacagataacacctaacaagtatgaaaaaagaaatcctatatcaagaaatagcgagaactattgcctgtcaaattaagaaaggcgtgtggaaagctggtgagaaactaccttctttacgcactattagcaatgaaaatggtgtaagtcttaatacggcaattcaggcatattatgaattggaaaaagacggatttataatatcacgcccaaaatcagggtatattgtcaattacaaacccatacgcctatctgttccagcgacaacacaaccgtctgtaaagcctgagagcaaagaggtggtagatttgattgctgacgtatacagctcgttagaaataggagataaatcgatcactcgattttcattaggaatgcccgaagatattttattaccaattgcaaaacttaataaagaacttataagagctatgcaggcacttccgggtaatggaacccggtatgatgaaacacagggaaatatgcgattacgtaaatctatagctcgttttacgtatagttggaagggaaacttgacagaagatgatatagtgacaactgccggagttactaatgcggttgctttagctttatctgtaattactaaggtaggagatactattgcggttgaaagtccggtctattttggaatgttacaattagccaatagtatggggttacgtatattggaattacctaccaatccagtaacagggattgatccagatgcgctgaaaaaagttttaccacaaattaaagcttgcctgcttataagcaactttaataacccattgggaagttgtatgcctgatgaacataaaagggtagttgttgatatgctggccggatatgatatacctttgatcgaggatgatttatatggtgatttattttttggaaattcacgtcctaagccctgcaaggcttttgacaagaaggagcttgttttatggtgtggtgcggtatctaaaacattagcgccggggtatcgggtaggatggattgctcccggcaaatttaaacatgctattattcgccaaaagaatattcaccttatttctacgcctgcgcttaatcaagaagcggttgccaatttcatggagaatgacagatacgaaaaccatttacgtaaactgcgacaagaattatacgcaaacagtattcattttgcccattccatcatggattacttccccgagaatacaaaaattgttactccacaaggaggatttatgctttgggtggaattagacaaacagattgatacaacagaactttattatcgggctatgcagcgaaaaataagcatagcccccggacgtatgtttacattacaagagcaatataccaattgtatgcgtttaagctatggacaacgatggactccacttcttgaagaacgcttaaaacaattgggggatataattaaaaatcactttaactgatgtatgtattcttttagtacttcccctattacttgaagtcctttcatgattctatcttctggcatattagagtaatttattctaaaagtattttctttgtgctcaacaggataaaatgaactgccgggtacaaaggctattttctgttcaatgcatttttgcaggatgtcatgcgctgaaatattttcgggtaattcaatccaagtaaataacccgccttgaggatgagtatattttatgtcattaggaaaatagcgttcaatacattctaaagctatatctctgcgttttctgtagacttctactattttgctaatatgctcatcaatatcatatcgttttagatattcggcaatagtcatttgagctattgtgttacactgcaaatcagtgccctgcttaactaacacatacttgcggataatatctttatcacctgcaatccacccaatccgaaagcccggacaaaagattttagaaaaactaccagtgcataagatattacctaccttatcaaaagactttatagagggtaaagactctccttcaaaccttaattctccataagggttatcttcaataacaggaatatcatataaagcagatagttcagccagtttttttcgtctttccaaactccatgtttttccagtgggattttgaaaggttggtattacatatattagttttatattttgagtattattcagtacctcttccaaagtagccatatccatgccttcttcatctgttggaatttcaatgaagccactcccatatgatttgaatgcgctaattgctgctaaataggtggggctttcacacaatacgatatcaccatcgtccagaaatacttttccggataaatctaatccttgttgcgaaccgtgagttataagaatattatccttatcgaacgatgtccctaagcgttcattcattcgtttggcaatccattcacgtaaaggataatacccttcagtagtcgtatattgaagagcttttgctcctgcttcttgcaaaacgacctgattcattttgttaatttcatctatggggaatagctcaggggcaggtagtccaccagcaaatgaaataacatcttcccgttctgtaactttgagtatttctcttatttccgaagcctttatataagacattcttttggcaaatttcaacttcataatcattaaatatatttgaaaactaaaataatgcaaagtaaagcataatagataaatgagaacagatacaatttgcacaatatcagcgggtacagattttcggaaccaagtattatcccgattgtatcgcctaccgaaagaatcaaacggacagttatcaatagaaagacaggactgatacttgcgtcgacagttattctagccgaacctcaattaaccaagcgtgagaaagaaatactaatattaattcggcaaggttttctgagcaaagagatcgcttataagctaaatcttagtatttatacggtaaataatcaccgaaagaatatattggcaaagctaaatgtagataatgcgatcgaagctatcaataaggcggaaaatttcggtattctctattgattacgatatccaatccaaaccactagctaatattgatatgattgcggttatatttcatcctctggggctgaatccatttgtgcgatgcgctatgagtgaattatacaatcatttttctgcggaaaaagtagtgcgggtatcgtatgtaaagaatacccgcactttctatttattttgaaaaacgtaattttatagttcaagattcacttcattcatattgatttcaagagagcgccgctatacctgttcctatcaagtttgcgttattcatattgttgatatggatttcgacatccgctaatgcggattcattaaggagttcttgtaatttctccagaacaagaatgttatagtttttatcttttctattctcgctccaaaatagactgccttcggctactagacagattttttgtatatctttattatatgatctcagtaactgaataaggcccagtagcgatgcggcgactaattgtgctgatctgttgtagatccaatgagctacatctacatatacgtccttgtgaatatccggatagttcatgatagcggtcaatttttgggcatcgaatttattctcaaactcatccaaagggaaagttgctttcaatatatcgcctagatacatacccgaaaccgctttctcaaaccgctgttttccaaggctgcctgaaatggcgtcaaccgtatcatcgactgtcgtgaggaatggaggatggaagttacccgactctaggttgacagggactaagccttgtatattatggctcggatctaatttctttattttatccgccggaatgaaagtggccatgttggtgcctgttcctacgatcagaccgatataggcgtcatagctattgtcggttaggccggcaaacaagctggcgatagtatcgtttaatactttaatacctgtaaatttgattttacaatgttcgtttaggtagtcgagaagtggtttgcctactaattgccctaccatttctttaatgtcgactccttttgtccaacgtaacaatttggcgtctccactgagtacggattctgctggataagaaaaacaatagccgattggcatttcctcatcccgttttatcccgacaatcatatcggctaattctttaaatagctcctcacgagtatatcccggtgatttcatgatcgacatgtcttttttccacccattgttgggatggatggttggtgatccttgtccaagatcgacggtcgctactctatagttggttcctcctaaatcgagaaccaatgcttttccattaatatcagaggttttgggagagataaaagtcggtatgcattgtatctccgcattttcatgttttaatccctcttcaaccttttcccgaaatgaactggctatctctttgagttggtcattttctaaccagaaaatatttttctccataagattgattttttgattttgaaatatccttgttagtgaataacaatttagaaagggatttgactatccttattggttgattaagttaaggggataaatttcgatactgtaaaatttgttgtgttaaatttaaattttgtataaacaaaagggtgacgatgtctgtttaaaacaccaaacagatgattttatttattaatctaaattaagatatatgataccgaaagtggagatagaagcaggcaaggcggatttaatccgtgagattttaggcgttaatgatttgcaggacattaacttacttgatgagtaccgtgatatatttataaaatcacaaaagtctgtgtatgagaatgaatctgttaatgatattaattgtacggattgaattctttgatagagagattccaacttcttttataggatgaggaaatgtttattcaatatattgtttactagtgtattacagttttatcgtaattctaccttatgaaactatagtttttttagcagaaaactgtagtttcccaaggagggaactacagtttccataggaagaaactgcagtttcttcctatggaaaccggagtgtcttttaggctcggtttgtgtaaacgataaggaaaatttactacttatcatttacggccttcccatattcctcatcacttaccggctcaagccaagtatttttgttggtttggggattgcattctacggcgatatgcgaaaaccaactgtccggtgaggcgccgtgccaatgctctacgtttggtgcgatttcgacaacatccccgggtagtaaacgacgggcgcttttacctcgttcttgataataacccacaccacctacggcgatgagtatctgccctcctgtatgcgtgtgccagttgtttcggcagttaggttcaaacgttacgttaaacattggtacgtttaaatccttattgcttgttaatggcgctagccaagacttccccgagaaatattgttcaaacccggtgttttcatttcctgtagggaattcactaatttttggaatttcagttttcatttcttgtgcgtttatattgccaatagagattaatgtgatcaacatggcaatggttattttctttatattcatatttgttttcttgattttatccatatcacaaaattatttaagatattccattacttttgtataccaattactgataagtgtaacagaattactgattttacaatctatagaatcttgaagttgatggcttttaaacaaatataggggatatctcaaattggcgagattggacaattgtcagtctgttgggattatgtatttttgtcatcataagaatctataggatgaagcctgatacggaaaacatatatcaacggaaaatcaatcaagtaattgattatatcaatgcgaatttgcatctccctttacgactggatataatagccgggcaagtaaacgtgtccgagcggcagctactacgtattatgaaaggagccttgaatgagtcattatatgcttatgtggcgaggcaacgtgtagagcgagcggttctatatatgcatacggaagatatgagtctggcagatctagcgagtcgggtaggctatgataacccccaatctttctcgaaagcgttcaagaaacaattcagcgtatctccgaaagcttatatggataagttgcgagcacgtctgagagaagagaccgagaagtggagtaatccacacgatcttgaagttgaggtttgtgaggtagatgatttagatttggtttatatccggatttttggaaaatatggtgaggccgaaccctatgaggaggcatggaatctgttgatcggattcttaaaagagaatcaagcgttatcagaggacacccgctttattggtctaagttttgatgacccgaacgtcactcatccggaccaatgtcgtttttatgcttgcgcttcggtcgggaaggagattattccatcagggatgttcggtacgattcgtttgcagaaaggaaaatatgcggtttataccttaaaaggtagttatgcgggattacaagaactatataatactataaatatagatttcaattataccaaacggcatggaatggcgtttgaggaatatgtgagttattcggaagaggatgacgatacgcaagtgacaaagatttatataccaataaaataaattagtatggaaacaaaattttgccaaagctgcggtatgccgctgcaaaagaatgaggagttaggaacgaaccatgacggaagcaagaatgaggaatattgttgctattgttataaggacggggccttcacgatggactgtacgatggatcagatgatcgatcattgtgcccagtttgtcgatgagttcaataaagatgcggactttcattatacgaaagaggaggccgtagcgaatatgaaattatttttcccgacattgaagcgctgggcggtacaataagcctctataaaaagcgtctatctgcgcttcggcttgctggattagtttcactggaatgcggggcttcttctcgaaaaagtccatttctatttgaatggtgttttttttaatggagcggctccaattacctattatctttccgttatacaagataaccgggtagaaggtgccgaatcggttgaacgcttttggatgatgttctagcggcaatacgtccgtgcggtttttgtaactgatcaagtattcatcgaaggcggggaggagacgcagtacaggttcgctctcattttttcctttccatgattggtggatgaaatattcacgggaatcgaacgtctcggtcattaactccgtcttgatcagattgatagcgagcctacactcggtagcggttagcccggaccaccaaacaaaatcctgtaactgggcaggggagtggctttgaaaatatctggatgccaatctcgccagagcctcttccctgcaaagttcacgagtaggagggacacgttcgtccaataaggcgtaagtcgttttctttcctttatcgatcccgctacagacgatgccttccacctcaccccatgtaaggaaaaggtttacgtgatctatggtgggcaaaatcccggatttttgcaattccgccgttacttcttgtttggtcaggcttttgtatccttccagtatctttccgatctgatctaggcatcttgtgaacagcgttttttctatcttcccgaaatgtcccttggcgtacgacataacggcagccttgatacgctcggaagatagcataagcatccaacggatatcctcggcggccacgaaatgccaagtaggacgcatcacatgggtacgtagaatatcacctttgtacaaagcctcatttaccttttcaagggaagaggatctcaagcgaataccgatcgcccatttggccatctcatactcctgcgcctggatagcgcccatccaagagaccaactctttcggggactcgaatcggggttgttccaattgttggctagctactcgtatatgtgttatcataatatatgaatataaacgcaaatgtacgaaataaagcgttaaacatcccataatcttgaagatatactcattctttttgtaccttcacgctagaaacaattagtgaaatttatgacgatagcgtatttaaatgtggctacagaccggcaacacttggatattcaaagggaagagatctcttcttttgctgcggccaaagatatccatgtggataaatgggtcatggaagtatccggagagaaagcgaaacagccgggaccaaagttaaaacttgttctcgaacgcttgaagaaaggggatgccttgatcgtatcggatattacccgtttgtgtcttaccttatatgagttgatggggatacttaccgtttgcatggagaaggacgtgacggtctattgtataaacgaccgttatatattcgatgaccggatggatcgccaattgatgattaatgtcttcaagcaagtagacgagattgatcacagtctggtttccatacgtacaaaagacgccttggaacaggtgaaaagtacgggaaagcggttgggacgtcctaaaggctcggaatccaagttgttcttcttggatgcccataagggggagatcatgaacatgttggagcggggagaatcggtaggatcgatttgcgagcatttcaacgtctctaagaatactttttataagtataggaagaaattcttcagatcgtaaggattggttttaataccaatcctttcgtttcatatatagccaagtcaatactccggtagctatcatgacggcccaagctatgaaataaccgtaacgccaatccaattccggcattatcttgaagttcataccccatacgcccaccaagaatgtcaaagggatgaaaagggtggagacaatcgtcagccgtttcatgatggcgttcatcctaagatcgttattggatatataaagatcgacaagggaagaggtgatttcccggcagctttccgttgtttggataacgaattggagttggtcttgcaggtcattatagatcggcaggatatccggggtgataatcccgttctctgttcgtaatagttttgagaattgatctttcagcggtaggctattcttacggataatcatgtactcatggcggtgttgttggattagggaacccatattaccctgatcgttcttaggatcgagcaaagtctcttctatatcctctagtatctcttctacctttgaggcggattctactagattcgctatgatggtgtttagaaggaaagcgagcagcaatccactgccttttttccggatgttcagcatgttggatagtagcgctttatgagcggcctcgaatacggggttgttgctttccgtaaaagtgataaccgtattgttagctaccagtatgctgatgtgctcagaccgcatctcgttattgacatcgtaatagcaggagtttaatacgataagcattcgtcctttgtattcctctaccttgaccacgtgttggggagtcaagatatccttagcgtccagattatgcagtccgaaatcttttacgatacgggtaatggcatccgcattggtcaatccgctaacctcgaaccaattgatctgattcgagtcggttagtttgctgaaagaggtgtcggttatccgcacctctttcgtatgcaaagattgttcgttgtattgagtgagacggatgccggttgctgtctcatgttcgccggcgtaataatacttgtccgataaatgccggttggatatatgtcttctcctgtgtgtatattcattccgtctcataataaggatctctttttaatcaaactcaacaacggtgataccggcgcctccgaactgcacatgctcgtcttgaaagcgacggacaccgggaaccgtgcgcagataatcccggattagctgacgtaagatacccgtaccggttccatgtaagatgcgaaccttgcctgccccgacttgaatggcgtcgtcgataaaataagtcacgctttgcaatgcctcatcgcccctcattcctctcacatcgatttcttgcttaaagtttatcttcttctcatgcatattgtcagtggtctgggagctgacgaacgtgcttttctggatttcccgtttgatctggcctttgcttaccttttccaactgctccagcttaaccgtgcttttgatcatcccgaatgctactacggcctgctttccttgtagttccataacggttccggcggaaacctgccctttaaggcgtacattgtcaccgacttctatcacctctttattaaatattggctgggccgtcactttttgtttctgtttcttccgttcattccgttccttgagcttcgccatcttgcgtgcgatcttatcgtcttcttcttcggtcgccattacggagttcttgaactcttccaaggctttgcgggccagtttggtctgttctttttccgcttgggcctccttgatctcacggacggtattctcgatcttggcgttagcctccgctagaatacgttgggcctcggcctttgcctcccggatgatctctttccgttgcttgtttacggcttccaagtcttgttcataacgagaagtgacatcttccagttttttctcctgctgacggatattctgccgtttgctttcccagtaccgtttatcgcgtacgatatcttgcaggtatttgtccatattgatataatccgctccgacgttcgcggaagcgtcggctatcacgtcctcgggcagaccgatcttgcgtgcgatctctacggcaaaagagctacccgggtttccgatagaaagcttgaacaagggctgcatcaaatggcggtcgtacaacatggcaccgtttacgataccctccgtatcctcggcgaaatgcttcaaattctggtagtgggtcgtgattaccccaaagctatgattccggttgaagcgatccaataaagcctcggcgatagcgccgccaatctggggttccgtaccgctaccgaactcatcgattaggataatggtccgctcgttacaattcttcacgaaatacttcatgttggtaaggtgggaactgtaggtactcaaatcgttctcgatgctttgctcatcgcctatatcgatgaatatatgctcgaagatcccggttcttgatcgctcatgcaaaggaatcaataaaccacattgcaacatgtattgaagtaatccgaccgttttcaggcaaacggatttaccaccggcgttcggaccggatatgatcaagatccgttttccctcggtcagctcgatatcgaggggaactacctgcttgccctgtttctgtaaagacaggaataagagcggatgcacggcacgtacccaatccatttgtcgcttatcctccacgatcggcttgatcgccttgacttgctccgcgaataacgctttcgcacgaatgaagtcaatgtcggcaagaaactcgtaagattgtaggatatccggagctaaaggacggatcacgttcgtgaattccgtcagtatcttaatgatttcccggcgttcttccccttccagttcccggatgcggttattcgcttccacgaccacctccggctctataaagaccgtcttgccactggcggactcatcatgtacgataccttttatctttcgtttgaaggccggggctaccgggatcatcaaacgaccgtcgcgcatggtcggtgtcacgtccttatcgacaaccccgtccgattgtgccgcacggaggatggattgcaggctgcgggaaataccgctcatcgtgatcgtcatttccctgcggatttgcgatagggtggaggaagcactgtccttgaccttgccgaatttatcgaggatactatcgatctttccaatcaattgggggaagacaaagatatctcccgccaattcagtcaaggccggatacttgatttcctcatcgtccataggcttgaagaagcgtacgatgtcattgatcgtttgcaaggaacgtttgaggtcgaacaactcccgttcatccagccaagtaccttccggccgaatccgtttcaaggaatagcgcacgtcgaagaaataactggcggggaattccgtgtctccgtgtaggatacggataaactcatcggtttgttccaatcgcttggatacgacctcgaaatcggcggagaatcccatctccgctacccgctcttccccgagcgggcttaaacatttttctgtgattaagtgacggatcttatcaaagcccgtcttttgttcaaaattttgtggatatatcacgtgtttgtaaaatctttatttgatctctaccgtcacttcagagcgaatggtaggacggataattacttctaattttgtcttgccacgctttatattaaatgtacaggcgttgttgccggacggattaatataaggggcgaaatagtataaataagagaacgccggcaagtaatcggagctttgcgacgcatccgctatttggggatatttgaatacgtcccagaacatgcaatacttgaaaccgttcgcgtccgtaaacatcgtcttcggatcacgatattgcatcgtgttcgtgataaagcgtttgtaggcggatgagaactcctctgccgaatgatccatcttatggcggccgatcttttctataatgtcacggggacggatgcctgccgcataagcgggagagttacgatctacgtcaaccacttgatccaatttatcgatatcgtagctgatccccgtataattataggtcttcttgctcaccttgaacggtacgttacgtccgtatttcgtgtatgggtattgcatacacatcaacgggacatgcacccgggcgtattcgtctaaacgataagagtcttccagcaactcgttcgcctcacattcccagagtacacgtccggggatatctttttgatcgatgatacggataccgaattgcaacagatattcggcttccgcttcggcggcggcgtaattcaagaacgggaatttctccatcttactgtgcgagaagttgtaccggtaagtcggttctttttctaccaatactttattcgctcccagatagttcgggttcttatcgaagaaatagaaagtctgtatcaataaatccggctttgcgatatcaaccgtaagtccttttttggtcaactcgttctcgatgcattcgttgatgaccgtttccagtttacggttattctcgtcgatggtcgagaaggcgaatgtcttgaagttaccgaaatctacgccgtcggatgtgacggtagtcttgaacgggcatacgaattcttgctcattggttgtctccaagctatacatcgcataggcggacgccagctggtcttccgtgatggcgttacttttcttgcagtccttctttactaatacttgtttagaaggagaggaaaggttgctgatagtcaataggacatcgtttcttccggcgggattcagcagttgagggatctcatcgacagatacctccgtcacgagtaccccgttgatctcctcgatcacgtcatatttcttaatacctgcttgctcggcggatgaataagggatgatacttttaatgaccggcttgttgtttccccagttcttgctctggctgatatcgtatgtgaagcctagtcggcagatggatgtattcctgttttgggcggaaaccgtacagaccgccaatactaatagcaacgttgataaaatcacacttctcatcatattctggaattttatttactctaaaaatacctgtttcgtttaaaacataggcaaaggtaaagatatttttgatgtggtggaatagttggcaatatatttgctgctataatagtgtatgaacttgatatggatgctgtgtatatactttttaagggtatttatgtggtaccgtatttcgcttacaattagttagtaatgaaaaaaatcagatagattatgagcaagatgaatccaaacgagaaaaaagaaaacgcttcaaaaaacgaaaacgtgaataatgaggaagcgacaaatttgcaggaagaacagtcaaatgcggcagatgaagctgccggctctgacaatgtgtcgggtgaggtggaagccttgcaaaagaaatataacgaattgaacgattcccacctgcgcttgatggcagagtttgacaattaccgtaaacgtacgatgcgtgagaaggccgatttgatcaagactggcggcgagggtgcgttaaagaaccttcttcctattatcgacgatttcgagcgtgccttgcagaacgtccgtgcggcggaggatgtagaggccgttaaagaaggcgtggacttgattttcggtaagttcatgggctatctgtctcagcagggcgtgaagccgatcgaggccataggcaagccgttcgatacggaggagtttgaggctatcgctacgattcccgctccggaaccggacatgaagggcaaggtattggattgcgtacaaactggatataccttatttgacaaggtaatacgtcacgctaaagtagtagtgggagaataatcggaaaatcggcaaataacaaatacaaggatggctaaaagggattactatgaagtgctgggcgttgagaagaatgcttcggcggatgagataaagaaagcgtaccgcaagaaggcgatacaattccacccggataagaacccgggcgataagcaagcggaggagaactttaaggaggcggctgaggcatacgacgtgttgagcgatccgcaaaagcgtcagcgttatgatcaattcggtcatgcgggtgtcggcggggcttcacaaggtggcggcttcggtggtggtatgtccatggaggatattttctcacagttcggcgacatctttggtggacattttggcggttttagtggcttcggtggtttcggcggttctcgtggaggacgccgtgtgaaccgtggatcggacttgcgtgtgaaggtgaagctgaacctgaaagagatcgctaacggcgtggaaaagaagatcaaggtgaagaagtatgtgccttgttcgcattgtcacggtagcggggcggaaggctcggagggtgtgaaaacgtgtgatacgtgtaaaggtagcggtgtcgttacccgtatcgccaacacgatcctagggcagatgcagacgcagacgacttgccctacttgtggtggcgagggcaagatcgttgtcaagaaatgtacggagtgtaatggtgagggcgtcgttcgcgacgatgagattatcacgatcaatatccctgccggtgtagccgagggcatgcaactctccatgaatggtaaaggcaacgccgcacgacatggtggaatcaacggtgacttattgatccttatcgaggaggaaccgcatccggagttgattcgtgatgagaacgatctgttatacaacctcctgctgagtgttccgcaagcagctttgggagccacggtagaggttccgaccattgacgggaaggcgaaattgaagatcgagccgggtacgcagccgggtaaggtgcttcgtttgcgtaataaaggacttccttccatcaatagttatggtacgggcgatttgttggtgaacgtgagtgtatatatccccgagactttgtcgtctacggagaaagagacgctgaacggattggagaattcaccgaacttccagcctaataagacgatgaaagagaaaatcttcagtaagtttaagcacttctttgattaacgaatagaaaagactactgtgttcgtgtgagaacactatagtattcgtggataaacacagtagtgtttgaagatgaatactatagtgtttatcaccggaatacggtagtcttttttcataagtcctaaaatgagtatcctatgagaatatatacccgtggaggagataaaggaaaaaccggcatacatggcggtgagcgtgtcgataaggatgacatccgtatcgaggcgaatgggacgttggatgagttgaacgccgagatcggtattgtccgtacgttgctgcctcccgatcatgaatggcaggtgttgctgggtaggatacagcgtgagatgatggccgtgatgtctcatgtggcgacaccatcggcgatccgtgatcagaatccgaatccgcttcccgatgatttgaccgtcttttgtgagtcccatatcgatgatctatccgcccagatggaggataacgggtattttatccttccgggaggcacacctgtttcggcgcacctccaattggcccgtacgatcacccgcagggccgaacgccgcttgtggacattgaatcggaaagacccggttcctgccgggatcatggcgttcgtgaatcgtttatcggatctgttctttacgatggcacgttatgacatgtttcgtcaagggaacgccgaggagcgttggcaatcctttctgtataagcggaaaaataaatcctagagggcgatatcttgccatttgcctttcacgagctcacgggtggacttgaagccggcttgctttagcaactcaaaaacctccttgcgaccgtcgttcaccaaatccggataatggcaatcggagttcaccatgacagggatattcattttccgcatccgtgataggtattccacacgggggtaaagctcttttttcttggtccagttcttggtgttgacctctaccatcaattctttctcctgaaccagatccagacaagcctcaaaaggcttccgataccaatcctcttcaaaattgaagatctcgtatttctgtccgttcatatagatcttgtcgatatgtccgacgatatcgatgcctccggcctctatcattttcatcgtggtatcgaagaaacgcttgacaagcaaccggacatctccctcgaaatgccgctccacggagtgggcgtattccctgaatgagccgtctatacagaccatgttctcttcggccagacgctctgatacgggcaggaaatggatggaaccgatccggtagtccaagggcaactcttggaaataggggatcgaggcgttataggtctcgtccagataatcaatctccagaccggcatatatttccagttgatcgctgtatttctgtttcagtcgttttatctcttgcagatactccggcatatcgtctttagacatattccagaaagtctcgaacggaagcggcgagtgggaggaaaaaccgtacgcacggaacccgtgtgttatggcgaatctcacgaaatcctccggaatacttcttccatcacaaaaagtacaatgactatggtagttactgagttgcatgattgttcttagtgattaaaaagccacatccagatcatcttgcccggatgtggccttgtatgatgaatgagagaggtgttatttgataacgcctagctcttttcctaccttgataaacgctgcgatagccttgtccagatgctcagtctcgtggccggcggacaattgtacacggatacgagcttgtcccttcggtactaccgggtaatagaaaccggttacgtaaataccctcttcctgcatcttggcggcgaaatcttgagacaacttagcgtcgtacaacataacggcgcagatagcggattgagtcggcttgatatcgaaaccggctgccagcatcttgtcgcggaagtagcttacgttgttcattaatttcgtatgtaaagcgtcgctctccttcaacatcttgaacatctccaagcttgcgcctacgatggccggagccacggagttggagaacaagtaggggcgagaacgttggcgtaacatatcgataatctccttctttccggtcgtgaagccacccatggcaccaccgaacgccttacccagcgtacccgtgaagatatctacacgtccgtaaacatcaaactgctcggctacgccatgacccgtcgggcctacgacaccggcagagtgagactcgtccaccataaccaatgcgtcatatttctcggcaagctcgcaaatcttgtccatcggagcgacattgccgtccatggagaacacgccgtccgtggcgatgatacggtgacgttgggcctgcgcctcttgtaggcaacgctccaagtccgccatatcggcgttagcgtagcgataacgtttcgccttgcataaacgaacaccgtcgatgatagaggcgtggttcaaggcatccgagatgatagcgtcttcctcgccgaacaatggctcgaacaaaccaccgttagcgtcgaaacatgcggcgtaaaggatcgtgtcctcagtcttgaaatagtcggagatggctgcttccaattgcttgtgcaaatcctgcgttccacagatgaaacgaacggacgacatgccataaccgtgtgtatccatggcttctttcgcggccttgatcagtcgttggttatcggacaggccaagatagttgttggcgcagaagtttaaaacatcacttccggcatttactttgatgtcggctctctgcggcgtagtaatgatacgctcgttcttgtataaaccagcggctttgatgccttcaagttcatttgtcaagaattctttaagttttccgtacataaaaacttcgttttttattagtatttagatgtgagtagtagcttcgttgtcaaagcgacagacaaaggtctgttttttttttgaattttaatactaaaaaagagaagaaattcatgtctaaactgttttattctctatacctttgccgacggaaaaaaacttaaatctcattaaacgcgatgaagaatgtattagtaattggttctaccggtcagatcggatcagagttaaccatgaaattaagaagtatctacggtgggaacatagtagcgggttatatcccgggtgcggaacctaaaggcgagttgttagaatcgggaccttccgctatcgtggatatcacgaacgagcagcagatcgctgagacggtatcaaaatataatattgatacgatctacaacttggcggctcttttgtcggctgtagcagaggctaaacctcagttggcgtggaagatcggaatggggggcttgttcaatgtgcttgaggtggcccgtgagatgcactgcgccgtatttacgccgagctctattggcgttttcggtaacaataccccgaaagacaagactcctcaagatacgatccgtaatcctcgtacgatgtacggcgtgacgaaggtatccggcgagttgttaagcgattattataatatccgtttcggcgtggacacacgttcggttcgtttccccggattgatctcttacgtaacacctccgggtggtggtacgacggattacgctgtcgatatttactattcggccgctaagggcgagaaattcgtttgcccgatcgcagccggtactttcatggatatgatgtacatgccggacggcttgcgtgccgctatcgagattatggaggcggattctacgaagttcgttcatcgcaactctttcaacattgcgtcgatgagtttcgatccggagatcatctttaataatatcaagaaatatatgcctgaattccagatggagtatgaggtagatcctttgcgtcaggctatcgccgagtcgtggccgaactccttggatgatacttgcgcccgccaagagtggggctggaagccggagtatgatttggatgccatgacaaaagacatgttagctaaattgaaagaacgtttcaataaataagagtgatgttgtagccatgattgtttgtggatagaggggccggggtatcatcgggggggatgatccccggccttgttttttaacgctgctatttcaataaatccggccggaggcgtgccgtacgctcttgtgcttgttgcaagcgccattcttcgatcttgcgctggtgcccggataatagtacctcgggtactttccaacctttgtaatcggcgggacgtgtataaacaggcggggccagtaagtcatcttggaaggagtcggagagggcgctttgctcgtcgccgatcgctcccggtatcaagcgtaccacggcgtcggttatgatagcggcggccagctctcctccggtaaggacatagtctcctacggatatctctttcgttatcaaatgctcacggatacgatagtcgatccctttatagtgcccgcagaggataatcatattatttagtaaagacatgctgttggccatgggctggttgagtgtctcgccatccggggaggtatagattacctcgtcatattcccgttcgcttttcaacgctgagatcgcccggtctatcggttcgatctgcatcaccattccggcctctcctccgaacggataatcatccacccgcctccatttattagtggtgtaatcccgtaggttatgtaaatgaatctccgctaatcctttatcttgcgccctcttgacgatagagcaattaatcatcccctcgatcatctcgggaagtacggtaagtatatctatacgcataaaaaatagttgtaacgttaaaacctcccgcaaaggtacatctttattctgactcatcgtaaagtgagtctctattatctatgattcgcgatagaaaattaagaatgaatgaaacgcatgcgttggcgcagttaagagttcgtagaagttcatgaggatatttttgtatcgtttgaattattattcgtacttttgtccgtcaattcggcggctatcaatagaggccgtgtctttagagaataaattttatagcgatgaatatatcttacaattggctgaaagagtatcttgatttcgatctggagccagaagaagttgctgcggcgcttacctctatcggtttggaaaccggtggagtagaggaagttcaaaccattaagggcggacttgagggactggttatcggtgaagtgttaacttgtgaggaacacccgaattctgaccatttacatataacgaccgtaaatgtaggtggcgaggctcctttacaaatcgtatgtggcgccccgaacgtggctgccggacagaaagtggtcgtagccgtgaacggcacgaaactgtacgacggtgatgaatgctttacgatcaagagatccaagatccgtggcgttgagtccaacggtatgatttgcgccgaggacgagataggtatcggtaccgaccataacggtattatcgtgcttcccgccgacgctgttgtaggtacgttagctaaagattattataatgtaaagagcgactacgtgctggaggtggatatcaccccgaaccgtgtagacgctacttcccatttcggtgtcgcccgtgacttggccgcttatttgaagcaaaatggcaagcccgccgaattgagacgtccttcggtagacgctttcaagatcgacgacgagacaccgggcgtagaggtcgtggtagagaatacggaggcttgtccccgttattccggtgttacgatcaagggcgttacggtgaaggagagcccggagtggttacaaaaccgtttgcgtgtgatcggccttcgtcccatcaataacgtagtggatataacgaactttatcctgcatgagttagggcagcctttacactcttttgacgcgagtaagatcaaaggaaataaagtgattgtcaaggcggccgaggctggtacgaaattcgtcacgttggatggcgtggagcgtacgttgaccgatcgtgacttgatgatttgtaacgtcgaggaaccgatgtgtatcggtggcgtgttcggcggtttggattccggcgtgacggaggagaccaccgacgtattcttggaatccgcttgtttccatccgacgtggattcgcaagaccgcccgtcgttttggcttgaatacggacgcttctttccgcttcgagcgtggtttggatccgaacaatacgatgtatgtattgaaacgtgccgccttgttgatacaagagttggcgggaggtaagatcacgggtgctgtacaggatgtttatcctgccgtggcggaaccgtatacggttgaggtgacttacgagaagatcaatacgttgatcggtaaggatattccggtagaaaccgtgaaaagtatcttggcaagccttgagatggagatcgtatccgagactgccgagggcttgactttgcatgttcccgtatatcgtatcgatgtgcagcgtgatgtagacgtgatcgaggacattcttcgtatctacggatataataacgtggagttcagcgataacgtgaagtccaatttaagttaccagactcctacggatcgtagctggaaattgcagaacttgatctcggagcaactttgcggttgtggtttcaacgagatcatgaacaactccttgacacgctccgcttattatacggatctgtctgtttatccggaagcacattgtgtcatgttgatgaacccgttaagcgctgatttaaactgcatgcgtcagaccttgttgttcggcggcttggagagcatcgagtataacatgaaacgtaagaaaggcaatatccgtttctatgagttcggtaattgctatgattataatattgataataagaaggaagatgagaccttggcgcagttcagtgaggattaccgtctaggcatctgggtagccggcaaccgagtggagaacaactgggcgcatccggacgagaaatcttccgtttatgagttgaaggcttacgtagagaatatcttggtccgcttgggcgtggatatgaaacgggttattttcggtaacttgacgaatgatatctattcttcgggcctaagcatcacgaccggttccggacgtcaattgggtacgatgggtatcgtaagcaagaaacttcgtaagatgttggatatcgatatggaggtttattacgctgagttgtcgtggacccaattgatgaaggagatcaagaaggcgaaagtaaccttctccgagatttccaagttcccggccgttaaacgtgacttggcgttgttgcttgataagagcgtacagtttagcgaggtcgagaaaatcgctaaggatagcgatcgcaagctattgaaggaagtatctctgtttgacgtttacgagggcaagaatcttccggcgggcaagaagtcgtatgccgtaagcttcttcatgcaagatgagagcaagactttgaacgataagcagatcgacgctatcatgaagaagatccagacgaatctggaacaaaagctaggtgctcaattgagataagaatttaattacataaaataaagataaactgataaacatatgggaagagcgtttgagtttcgtaaagcgagaaagtttaagcgttggggcaatatggcccgtgtattcacgaagttaggtaaggaaatcacgattgcggcaaaacaaggtgggccggagcccgagaataatcctcgtttacgtgtgttgatgcagaacgccaaaaaggagaatatgccgaaggagaacgtggagcgtgccattaaacgtgctgtatccaaagatttcacggattataaggagatgaactatgagggatatggtcctttcggtatcgctatcttcgttgagaccgctacggataatacgactcgtacggtagccaacgttcgtagttatttcaataagaacggtggttctctgggaacatccggtagcttggagttcttgttcgaccataaatgcgtattccatatcgccaaaaaagaggatctttctttagaagacctagagttggagttgatcgacttcggtgtagatgaggttgaggaagacgaggacgaggttgttctttatggtgagttcgcacagaattcggcgatccagaaatatttggaggagaatggttttgagatcttgagtagtgagttcgtacgtatcccgaacgatttgaaggaggttactccggaacagcgtgagtctatcgagaagattatcgagaaattagaggaagacgaagacgttcaaaacgtattccataatatgaaggaagacgattctgaggaggaataacgtacgcttatacgtaaaatagtatactttatccgtaaaaaagcgacatcgaggcaaattcgatgtcgctttttcttttttacaacgaatgtttcatgttttttatttatttttgtgagtctagggtgaataacaatttaacttatatggtgaaaatgaaaagactatttcttctttgtgcgttcgtgagcatgtttgcgacgtgtaattttatctcagctcaaaaggagttagggattttcaattctgtttcggcaggagtgggtgttggtttgacgggtgtagatgtggaagtcgctactcctattacgccttatctggcgttgagaggtggtcttacctttatgccgggtttcagcattaatacggacgtggatgtagatgttaacgatccgcgagcgggtgtgtataatgatacatactccatggatgtcaaaggtagcttgaaacgtacttctggacagttgttggtgaatgtttacccgtttcctcacgcttcttcgttcttcgttgcggccggcgcctatttcggtggttcttccttggtgaagatagaaggacatagtgataagctgaaagacctgatcgcccaaggagaaagtgcgggcatagttatcggtgattatacgattccggtggataataacggtaatgtatccggtggattgaaagtgtccggttttcgtccttatctaggtcttggattcggtcgtgcggttcctaagaaacgggttggcgtgatgtttgagctgggtgtgcaattccatggcaaaccggaggtgtatacggattcaggggatgtaaaggacttgttgaatgagatagacgaggatgatacctttacgaagatcatggacaagctaacggtttatccggtcatgaagattcgtatttgcggaagaatattttgattgtcaaagatagtataagctaagagtggcgttaataatacgatgccactctttttttatggctaaactttcatttattttgtttatttttatgcgctgttagggtcataattttgataaaaataactttatatgaaaaacaaacatttggtgatgctattgctatcatcttgctgtttagcggcatgtgtggatagtaagtatgatttaagcgatgtcaatacggacgatgcggtaatgggtgagtcttgggtagctcccctcggtatgggttatgtaacgtcggatgacgttgtgaatgtagagaaagtcccttccattcgggaagtcgacggggcttacgtcatgatctatgatggagagatgaagattaaggggaaaagcttacgggccgcctctgataaagtggagatcgcctcggaagatataacgactggggatatcgatggcttgttcgatggcgatttcgttttggcgttaacgaacccccacattacgttaaagtcgaatgtaaagaatgcctctttggattgtagcttgtctatcgaggctgagaacacaagtaaaaaggaggctacttcctctgattttaccttgtcaacggtgtctcctaatatttggatcggccctcttgatccgaagacggatgcttttaagtttgtcaagaacgagaagttaccgggaatcgtacagattgttcctcaaaaaatacatttgtctttgtccgctgatagcaaacaatggacgaacgctcctgcggatgccttgagtgagttacgttatgcggtagagcttccgttgactccggcaccggaatttagcgccgtatccgtcgagcggatcgaggacgcttttgatgaggatttcgtagactatattttctcggacggaagcgcgaggatctatggagaggttacgaacgagatgccgttcgatatgtctatcgagatggtgatcatggatgagaacaatgtaccggtagatatccaattcccggcacaagaggtaaaaggacaatctggagaggttatcttcgagatcacgaaggaggatatgccgaaaatgaaggatgcacgtcatatagacctaaatttacatttaacgggtagagatcaaggcgaggctttgaagaaaggccagaaaacgaccttcaacttgaaacttaagaaagaaggtggtatctccatttgatcccagtactaaccatttaaattacgaaaaagaaagatgaatactatatataatatgtataagagaggtctgtgtgctttatgtttattgaccactgtgggaatgtcggtatccgcccagcaaatacgaacttcttacttcatgcaatcttctacggcacgcacgacgatgaatccggcgtatcgtcccgagagaggctatgtctccattccggtattaggtgcggttggcgcttcgtatggtacgaacggaatagctgtggataattttatttatccgaagaatggtgagaccgttacgttcatggataactccgtgaataccgagtctttcctgaatggcttgaaggatgagaatcaggtaaacatggattttggcacgcaggttctatccggtggctggtacgccggcaagggattctggacggttgatgtttctatcaagggcttggcgaatattcgtgctccgaagacattgttcgagttcatgaaaaagggtaatggatctcagagtacctatgatattcgtaatatcagggcgtacgccgaggcttatttggagacaggtgtaggatattctcgtcctatcacggataagttgacagtcggaggtaaggttaaattgttatggggcgtaggttctatggacgctacgatcgatcagatgcatgctgagatgggagagactagctggaaagttacctctaccggtaccttgcagacgaatatgaaaggcttggtcccggaaatggaagtagacgagcaaggccgtgattattataatagctttgatttcgattctccgggtcttagcggtttcggtatgggagtggacttgggtgctacgtaccaattgaccgagaatatcatgttgtccgccgctgtccttgatttaggttttatcagttggagcaaaggagggagcacggtaggtaagttggatggaactttcgactttaacggctttgatctggctatcggcgagaataacggtgatataccgagcatgggcgatcagtttgacgctatcaaggaagatttcgagaacttgcttcatttcaagaaagagggtgagtccggaagcactacccgtcttcgttcgacaatcaatatcggtggcgagtaccgtttgctggaaaacaagttaggtatcggcttattgtcaagcactcgtctttattccccgaaagcctatacggaactgacattgtccggtaattaccgtccggtgaaatggtttgaggctacgctgagctactcatttatccatagtaagttcaagacgtatggtatcgccttgaatttctcaccgtcttggatcaatttctttattggatcggattatatgttgacaaaggtaactccacaatgcttaccggtaagcggtaacgccatgaatctttacatgggagtaagtgttcctttgaaatcattcgctaattaatagggaatactcagaatagagtctgtatcataaaggaaaaggctgtccgggttatatacccagacagtcttttcttttttattaggctcgttttattaggttttttatctttgtggactgattgaaaggaagaaattggatatgagattaaagactttagccacccatccggtatggagagagccccggactgtattcggggtatggatgctaaccggtgttatttttgctattgtcaagttgttgattggaaaatataataattataagatatttgaaggagtctattggcatgctatcgaggggttaaccttatatggggatcattatccggaatattatgattcaaatcattatggaatcttatttagtcttatcatagctcctttcgccctgttaccggaatggttgggtataatcttatggatagcgggtaataccgccctattgttttatgcgattagccgattgccattgtcgagtacccaaaaaatcattatttattggtattcgtattgtgagttgatgacggctcaaggagtacagcaattcaatatatcagtagcggcctttatcttattatcgtttgtcttgatactggagaaaaaggatttctgggcggcaggcattattatgctcggaacatttatcaagatctatccgatcgtgggattggcgttctttttcttctcaaggcagaaagtgaggttattagcctcttgtcttttctggggattggtttgctttgtgatcccggtgctttatacaccggggtttgagtatgtgatctctcagtatatagattggtttgagcgattgaaggtgaaaaatatgttgaatatgttcgctgatccacaaaatatatcattattaggagtggttcgaaagatatccgggaatgcggagtatagcgatatgtggcttatcataccgggcttgattttattctgcattccatatttaaggatctctcaatataaatatccggcttttcgctttatgttgttggctaatgttttattatttgtcgtattattcagtacgggaagcgaggcgagtggatatatcatagcgatgataggagtcgctatctggtatatatgcagtgtatcgccccataagaaatatacttattggctttggatagctaccttggtgattgttggcttatccactacagagctggttccatctattgtccggaatggactgatccgtccgtatgtgataaaagcttggccttgcattgtggtgtggctgaccatttgctatgagatgtgtttcttggattttagtcattctccctataagcatatcacgacttaggcagagtgaatatcgcctgttttttaatagaaggttacataataaaacgagactactcccgacaagcgatgagagtagtctcgttttaaactactttttatcgatctctttcagtaattcttgtaccgctgttctcaattgcgtatcttcccctttgacaacagtttccggagaattagcgactttaacatccggttccagctgtgtgttctctaagtaactaccgttcgacaggcgataaccggtaataggtgtgccgaatatcagcgtcggatcttgcagggtttcccaagagacggtagtcattgttcccggtacgggcatacctaccagacgtccgatctgttggtgcttataaacccacggggttccatgtgcgttactataattagcctcgcattgcaacatgatggaaggtttattccagcggcggctaggcatatcgcaagcctctcggccacgtgtcacttgggtgaggtatttctctccgctgaacaagatctcgatatcctcgtgcaagcgcccaccaccattaaagcgggtgtcaatgacgattccctcccggtcgttatatttacctaggatatcggagtagacagagcggaaactaggatctcccatggattggatatggacgtatcccaatcgtccgttcgaccatttatccacgtcggcggcacgttgtttcacccagcgggtataaagcaagttatttaactcaccgttactgataggcaagactacctcttcccagcgttccttggtttgtggatcgtagagggaaactaaggtcttctttttggccttattgtttaatagcttggagtaatccatatccggggttatttcctgtccgtctattttctccatgatggtaccggctttcactttggaacgtgcgtgatcgaacgggcctttttccactacctcggcgatcaatagacctttgccgctatggttccaatcgaaaagtaggcctaggttggcggtaacattgccgcttgttcgcggacggaagcgtcctccggtgtgagagacgttgagttctcccagatattcgcttagcaactccgcgaagtcatagttgttattgatatgtggcaggaacttacggtaggcggcggtcatagcttcccaatttacgccgtgcatgttcacgttgtagaatcgtttttgttcttgtttatagacatggtcgaacatatactcacgttcggcggccaagtccattttcaagtttgcttgataattgatcggcgttagtttctccgatcccatatccatcttttgcatggagttgctccccagcaagaacaggttcttaccttccttatccatttccatgttcgcccatccggtattcatcttgtggagtaacttggtctctttcttgcgcaagtccattttccacaggtcgtatttgtcttcgaaagccgagaaataatataaggtctcgccattcttcgagatgacggcactacccatttcggaagaattaggagtaaggcgtaggatacgatcttggattcctttcagttccactacgatatccttgggcttttcgtctttcttctcatcggctttatcttcttttttcttgtcgtcggctttgtctccggttacctctttctgctccttttccagttccttttgcagctcataatcctctttgctcaagcggaatttatcataagcgtcttgattcatgaataccagcatggcatcattcaaggagccccatgaggcatgcgcacgcattccgtaacgctcggtggtgaataagatggcgtttccatccagtacccattgcggggaggtgctggtgtaaccgctattggtcaggttggtgatctctccgccttgtgcgctaaccaagccgatatccgaataaggatcgtgcttgtttccgataaaccggagcgtgaaccatttaccgtccggcgaccatgagtaatcgaaaccaccggctgtgctataccatgtggagccatccgtgacttggcgtactttcttcgtctcaaggttgactaccatcaaccgcatacgatcttctatgaaagcgagttccttaccatccggtgagaattgaggataattacgctctacggtcttagaaggtaagagaacttcctcttcgataatcgttgcgttcgggaaattggcttcttccttacgtgcgatcttagccaagtaaagttgccaattaccaccacgctcgctggcataagccaaggtacggttatccggcgagaagcatatgcctgtttcggcggccggggtatgggtgatttgcttggtcgtgttgtaatcggccgaggtgacgaatacctcacctcttagggtgaaggcgatctgcttgccatcgggggatacggtagcggaggttgctcctttgctggaattcagatcggcgatttgctcttgatcgtcacgtatcaagtcgatccgtactttctgcggattgcttcccggacgttgtgtatagatctcgccatcgtatgtgtagcacaatgtctggtcgctacctgtagagaggaaacgtacgggatgtgtcttgaacttagtaaccgccgttatagattgtggggtgttgagagggaatgaatatacattgaaagaccctccgttgcgttcgctcagaaagtaaaccgtctgtccatccggggtaaatacggcgttccggtcttctcccgcatggtcagtcaaattggtatgttttcctgtttgcgtatcgtacatccatatatcccgggtaacggatgaggtatgatgtttacgccattcatcctcgaagcccttacgatcttggtataagaatgtctttccggatttatcgaagcaaaccatctcggcgggtgttcccaatacttgctccgtgcgtccgccaccaaccggcactttatagagttccgtcatggccgaggtcgggaataaggcgctctgtgccggatcttgtatggatgcggagaagagtacgtatttgccgtcgggagtaaaggccgatggaatctcggaggcggaatgagtggtgaggcactgtgccgttccaccgttggagggcattacgaataaatcgaaattgccgttacgatcgctggcgaaagcgatttgttttccgtccggagaccagattggcgtgcattcatacgatgcttgggtggtaagttgtgtcgctgttcctcctttggccggtactttatagatatctcctttgtaacaaaacgctatctctgttccatcaggagaaatttgtacatcacgcatccacaaaggggttacagcgtagctggtagtcgcaaagcccatggcaatgcaggttaaaagttttttcatgtacttaatgcttttttagaatggtacgaagatacatattattttgtacccatcagtctgctctctattgaaatattaactggatttaccctttcaatttcactataaataacacgaggctttccccttgggcctgtgcggggaaagtatttcgcagatcctctccggatttgctgaaacaataggaatggcaatagggatcgatagggtccattcgtcgcacattaccggtttgataaaaattatcttttaatccttcttttacctgccagcattcttccttctccgtatcataacagaaggtgtaatttctggactcatcctctgcgttatagtatgtagatacccagaaacggctgcccatgcggatcggtagcaaagggagtgtattctttccggcaaggttctccaaggcttggctttgccgcttttgcttaatatataaagtgtcccgtaataagttcccgggttgataggagggggcgtaggcataaaccgttccgctttcgagctccacggctacttccggggcgagacaaccgatcgggcatgcggaacgttccagatcgaccggacggatcgtatgagattgtaatttatggaaagaggaatcgtattcaacgatctgtttctcaatcgtagcggtttgccctgctgtatccccatgaacacattcctcggtggtaaatatccggttattgtgcatggatatggatagcatatgcctattctccggaaggtcgcatttcagtttcttgcgggtaaggagatcaccattgaatgagtaatagaaaatatcgtccgtgtttccaagtacgatcagctgctggttggccgggttcactacataccccgctacccatatgtcatccggatgggtgatgcgacagataaattctcccttgcgattgaaacggtaaagcgtctcattgctgataaggaataggttatctccctcttgacggatatacttggcctccctgatcgaatgcgtccctgagtcctgtaatggaatggcgattacctcatccgcgatgtcagacaaggctccggtagggttgctgcggatcgattcattcgagattaacaggttataggcttgctttccgcaaaccaatagaacaagtagtaataaatatgtaaaggttcttttcatatcaccgctaaattaaagaaggataaacctttttatgatttttacgaattgtttttataaaacgtagatcatctgattttattggataagcctagaattattcttgtagaaatacccaattatccccctcggacatggattctttataggaaaagccttcccatgtgaatgcttttaatgcctccgggtcagaaatccggttctttatgagatagcggctcatttgtcccctgcacatcttggcatagatcacgatcgtctccgctttgccgttcttccagatcttgaactcgggcgtgatgatccggacggatcgctccacctccttccactggaaagagggttggatatccaagctggctagattcagtaggattctgtctccctgtcggacgtcatggattaatgtatttgtttgcctgtccttccagaaggcgtacatattcccgtcgcctagttccgggatttttacgtcgaactccatccggtaaggcttgataaggtctaatgggcgaagtaacccgtagcatcccgatacgaaacgcatatgttcttgcgagaaaagaaaatcctcctccgtgaagtctttcgggctgatattcttgaatacgacaccggtataggcgagtatcgcttgcaagggctgtttgtcttccgcatgaaaatcttggtatctgcggtaacattccgccgccagtttcgggctgagcttgaggatacgacttaattcgtcaatgggaaattgggtcatatgcagggcgatctcgttcgcctcttgctggaaacgtggagtcgtgccttgcggcgcttttatcttggatgtcccggtcattgtcttagccggagataataatatcaacatatctatattggatttggattgatcgcataaaggtaatccatattaagattcaaatagggtataagcatctcaataaatcttaaagtatctcgactcgaatgggggtttcgatagaggaatgagtcttggtgataaaaatgtaatgaggattatgaagatgagagacgtgaagatgcgacctatattccttttgatagtatccatcctacctatgatggcccatgcgcagtggacggaacaggattctttgcgcctgcaagaatttttatccggcaaggaggagatacgtttgaatcctgagtttcagaaggcgatagaaagcggaacttttctacgacccgatcaaccgggaacccatatgttatcctcgccaagtgagttgccgattacgaaagacttctcggaatatgtacagttagatactttacgtaggttgactaattatgattcgattaccccagtcctattcatgctgctgaattttaagtcaccttcccgttcattggccatacagaagcaagcgcacacgattaggctccctaagaatcaggattggaaagagtttaaggtaggtaaggttcctatggctgccaacgtaaaactgactaatatatactcggatgtcgtgaaggatggccagcgaaggggaggggtactcgctaccataagagtctatttcgacgcagaggatttactagagactattttctggaaaagtgcccgtgacaagaagagaaacaggaaacgggagaatacgtggaagtattataatgactatccgtaaattgttggatttataggatataaccactcgaaaaaaacacgtacgtgaatttcaaaaaacatgtacgtgtttccggaaaaactcgtacgtgtttttttgagaacattgactgtttttacctagatactgtgtgtttactatcaaaacttttttctctctcttttgttctttctgaaaagatacgtccgaatgacatccgaaatggacggtttgacggggagttctctattctgttttataatattaagacaaaatgtcatattttcgttttggtatttcttttgtaaggatataagtgtaaaataaaattagaaaagaatataagaaaggagcttaaatacatgaatttaaacaattttacaatcaaggcgcaggaggctgttcaacaagccgtacagttggttactaaaaataaccaacaggttatcgaacctgttcacttgttgaaagctgtcattatgacgggtgagagtgttactaattttatctttcaaaaattaggggtaaacgctcaaaacctgaatatggtactggatcgccaaatcgaatcttatcctaaggtttcgggaggcgaaccctatctctctagcgagtcgaacgctgtcttacagaaggcgatcgattattcctctaaaatgggggatcaatatgtatcgttggagccgatcatcttggcgttgtttacggaaaagagcaccgcttcacagatattgaaagacgccggcgtgacagagaaagagttacgtcaagcgatcgaggaattgcgtaaaggaaataaggtgacaagccaatccgccgaggagacttacgatgccttaggaaaatacgccatcaatttgaacgagcgtgcccgtagcggtaagctagaccccgtgatcggacgtgacgaggagatccgccgtgtcttgcagatattgagccgccgtacgaagaacaatccgatcttgatcggtgagccgggtgtaggtaagactgctatcgctgaggggttggcccatcgtatcgttcggggtgacgttcctgagaacttgaagtctaaacagatcttctcgttggatatgggcgcgttgatcgccggagctaaatataaaggcgagttcgaggaacgtttgaaagcggtggtgaacgaggttacgaaatccgagggcgagatcatcctctttatcgatgagatccataccttggtaggagccggtaaaggcgaaggcgccatggatgccgctaacatcttgaaaccggccttggctcgtggtgagctacgttcgatcggtgccacgacgttggatgagtatcagaagtattttgagaaggataaggcgcttgagcgtcggttccagaccgttatcgtagacgagccgagtgagttggatacgatctccatccttcgtggtttgaaggagaaatatgagaatcaccataaagtacgtatcaaagatgatgcgattatctctgccgtacagttgtctacccgttatatcacggatcgtttcttgccggataaggcgatcgatttgatggatgaggccgctgcccgtctgcgtttgcagatcgattccgtaccggagtcgttggatgaggtttcccgccgtatcaaacagttggaaatcgagcgtgaggcgatcaagcgtgagaacgatacctcgaagttggagcaactcaacaaggagatcgccgacttgaaggaggaggagaccaagcaaaaggctcagtggcagagcgagaaggagcagatcaataagatccagcaaaataagatcgatatcgagaacctaaagtttgaggctgataaggcggagcgtgagggtgattacggcaaggtcgctgagatccgttacggtaagatcaagcaaaaggaagaggagatcagggaggtacaggctaagttgaagacgatgcaaggtgccgcggctatgatcaaggaggaagtggatagcgacgatatcgccgatgtggtatcccgttggactggaattccggtcagcaagatgatgcagagcgagaaagataagttattacgtctggagtccgagcttcatacccgtgtgattggtcaggaagaggcgatcaacgctatcgccgatgcggttcgtcgtagtcgtgccggcttgcaggatccgaaacgaccgatcggttctttcatcttcctcggtactaccggtgtgggtaagacggagttggccaaggcgttggccgagtatctgttcgatgacgagaatatgatgacccgtatcgatatgagtgagtatcaagagaaattcagtgcgactcgtttgatcggtgcgcctccgggatatgtgggttacgatgagggtggacagttgacggaggcgattcgccggaaaccttactcagttgtcttgttcgatgagatcgaaaaggcgcatccggatgtattcaacatcttgttgcaagtcttggatgatggacggctgacggataacaaaggccgtgttgtcaacttcaagaacacgatcattatcatgacaagtaacctaggttcttccttgattcgtgagaacttcgagaagatgacacccgccacgcatgacaaggtggtagacgagacgaagatccaagtactggaactgttgaagaagacgatccgtccggagttcttgaaccgtatcgatgatatcatcatgtttactccgctgaacgaggaggagattcgcaagatcgtatccttgcagttgaacagcgtgaagaagatgttggctacgaacggtgtcgccttggacttcacgaacgaggccgtggactttatcgccgacaagggcttcgatcctcaattcggtgcccgtccggtaaaacgtgtcattcagaagtatgtcttgaacgagttgtcaaaggctttgctgggtggaacggtagaccgtaaccgtccgatcgtgatcgatcggaaagacgatgggctggaatttaagaactaaagtagacttgaacgcttgacgttaagcgtggagtttctataaaataatgaaggtggaatgatcctatgtgaatcattccgcctttttatttttcactaataggtagatacggcttggtgcgattatttccgggtgggaaccgtgcaccaaaatgtagatccttttccaacgcttgactccacgccgatctctccacctaaatgtttaatgattaattcacagatagacagcccgagccctgtaccttgggtgaaggaatctaatttagcgaatcgctcgaaaacacgggagatattttcttccgctatcccttttcccgtatcgctaacaaagaaataaatattgtttttccttatttcatatccgatcgttatcattccctcgaaagtgtatttgcaagcattattgatgaaattagccaatacttgggataaacggtttctctcagtatggataatgtagctttccgcaggcagttccgtgcggaattctactccttccttgatcttgaatcggtaactccgccatagggtttgtataagctcgttaatctccacttccgtataaaggaaatccaatataccggcttctatttttgacatatcgagtatgtcattgattaaattaaggagtagctcattgtttgcgtgaatgattttagcgaattctttgatctcctctttatcctcactttcgctgataagggtcgagaaacctacgattgcattcagtggggtccgtatctcatggctcatattggcgaggaaagcacttgtcaaccggtttgattcctctgccttctcacgtaagcggatcacttcttcggccatatttcgttcggtgtcaagaatgtctttcttatgccgatgttccctcatcgaaaggaggataagtagaaaggcgataagggctatcgccactatctcgaatggggactctatcatgaaactcgggactactacgaggctcatttgcttaaaggtagaaatagggtaaagtttggggttgattgttgacgtggaatggccgtatgcttgatcggttttagacaggaatgatttgtaggcacctttcatggaatgtttaagatcgcttggcgtgattggactgattacatatgaggccttgaataagtaagccttgataggcccgattttgctccggagagctcgggtacttgtggtactttgtattttaggttccattgtaatcataatttaatacatttactgagttctaaaagaacttgagtatcaaatgactatatgtaaataaatgatggagtgtattttgattttaacacaaataagactggctttagtgttttttgtgatccataaagatattggaagtctctttggggtactcggttggaaatatattctttcaaagaaaatatcatgcggaacagtaaattacccggaagctataaaaaataataggtctatatgataatcaagtatttttattacctttgcttcctataaaacctaagctcttttagaactatgttcaagtaagggcatttgcttttgttaagtcacgtccgtaaataagcttaattgtttttgggatataaaatcaaaatatttccgtacatttgccgctattcaaaccaattaaacaagattaattatgagcacgaacaatgacgagctactttacgacgaggatgattccgtaaaatttatccagaattatcttccccaagaactgaaaggaaagttcagtaatgacgatatcaactatatcgtagacttgatctacgacttctatgaatctaatggcatgctagatgatgatggcgacgatgagatcgagatcgatgaggaagaggttgtaaattatgtaattaaaaacgcccagaaagacggcgtaggcaaattcgaaccggaggaaatcacttttatagtacaaggagaacttgaatattgcgattcgatcaacatgtttgattgatatttgttatatatataaagttgtttaagtgaaattgtagaagatgatgaggaacattaaattattatctgttttactgctatgtatggcagtggtgtttacgagttgcggaacgtggaataacacggcgaagggtacggcgatcggtgtaggcggtggtgccgctgtcggagctggtgttggtgccttggccggaaataccgcattgggtgccgtgatcggtgcggccgtaggtggtacagccggtgcgttaatcggaaagaaaatggataagcagaagaaggagctggaagctactctgcctgaggacacgaagatcgagagtgtgaacaatggtgaggccttgaaggttacttttgactccggtatcttgtttgccacgaactcgagtacgttgagcgacgcttccaagagtgccttgcgtaacttcgctaccagtttgaaggccaatccggatacggatatccgaatcatcggctttacggataacaccggtaaggtggattataaccagaccttgtccgagaaacgtgcgaagagcgtttacgattacctgatgatgcagggggtaagcacggatcgtatggtttatgaaggtaaaggtatacatgatcctgtggctagcaatgacactcccgagggtcgttcgttgaaccgtcgtgttgagatcgtgatcttggctaatcagaaaatgatccaagaggctcaacaaggaacgcttcgataagtttttttaagctatccctgccggaagcggacaggttatagggtatgaattgggggactgtcttttcgggatagtcccttttttgtttaaatcgcaggataggaaggatgaagaagttgatatatattttatttgtgttgattacgatcgcttttgtcgtggcggccatagccggattcgctaccggacgtattaatccggaagggaaggagtggatctcgtttcccggattggtgttattaccggtattggcggccaatctatgtcttttcttgatgtggtgtgtctttaggagtcattggtgctgggtacctttggcggcgttattgttgaactgggagtttttgatatcgatgttccagatacgggtcttcccaaaagagattccgatagggaaagaagcggttaaggtgattacctataacgtgaataatttcaatacggacggaaagaaacagcttcctaatatagcggattggctgagaaaggaggacccggatatcgtttgcctccaagaatgccctgttgaatcggccctgcggatggattctgtcgccaagaccttatcgttcctaccgtattattgctctacccgttcggctacgaaagcggcgggcaacgctattttcagtaaatatccgatccttcgttttgagtctatcctatacccggagtctagcaataaatccttgtttgccgtcatggatatccaaggggatagtgttcgtgtatttaataaccatttccaaacgactagcgtgaatgccgtaaagcctcgtctttaccaagcccatgcggagggtaaacaattggaggaaaccgaggccgccttccatatggcttttcagatgaagaagaatttcgtgaaacgggcgactcaggcggattatatccgtcagatgttggatgccggggaggggcccgtgattatttgcggtgattttaatgatacaccggcctcttatacgtaccgtaccgtgaaaggtgatttaacggatgggttccgtgactgcggctctggtttcgggtacacctttcgtcaattaaagcgtatatttcgaattgattacataatttattctcctgattttaagggtgtaacttatgattctcctaatttagactacagtgaccataagcccgtcgtatggttaggatatgttaattaacacacccaaaaggatagttttagaacctttttcaactcatgctgttttaatagtgacttatatataagcacaaataatagtataaactgttttaaacgttaaaatgagatgaaaaagatttttcctttttttctgttagttcttctgttggcttcttgccaaaaggacccggacatgtcgaaattggacaatgattttctggtgttcacgaatcacgataaggacgcgaaattcgaatcgttcactacgttctacattccggatagtgtattggttatcggcacaagcgagaaacctcagttctggacagccaatgaagcagacgatattatcactacattggtgaataatatggaaagccgcggtttcaaacgcacgctagacaaagataacgccgacttaggtctgcaagtttcttacgtacaaagtactcaatatttcgctgactacaacgatggctacaactacccgtactggtggtggaactatccgggatattggagtccgggttactggggaccaggttggggaaattggtattacccgtatcctgtagtgtatagctatagtgtaggttccttgttgacagagttagtggatttggatactcctgccgcttctaaggcagacgctaaacttccggttctttggactgcttacatgagtggcttgttgtctggttccgataaattcgatactcagctggctgttcgtgctatcgagcaagcatttgtacaatctccgtacgtaaagaaataataattcgaatgattaaaagtttgagattctatgaaaaagataaataaatcaatcaagttaatcgctttactcgtagtttgtatggcgatgcctactctggctggcgcccaggttttgaaaaacgcgtatttcaatgtagactggcaaatcaactctccgttcggtcaagacttttctaagaagaccagcggttggggtgctcacgctgagggtggttactatgtgattcctaatttcgctataggtgcgttcatctcttatcatacaaataatgagtatgtggaccgccagacgattccggtaaactcaacatccgtaatcacttccgatcaacagcattctatcttccagttgccttttggtgcggctttccgttataacttcgctccggaaggacaattccaaccgtatgttggcgctcagttaggtgctagctatagtgagatgtctacctacatgaacgtgttgaaggtttacgatcgtaactggggattctatgtagctcccgagatcggtatgaccgtgtacttcacacctcagaaacagatcggcgtacatatggccgcttattataactacgctaccaacaagggtgatgtcctcagctatcatatcgatggtttgaataactggggtatccgcttaggtctagcgttctgatagacaacgtttgttcttttaagtgttttatgtagtttagggaaacggagggcagtgaatgtcttccgtttcttgcttttataagatctgtagtttcaccccgaatgaaaggcttaaataatcttttggcttcaagtagctgttgccgatagcgtttattatatacaaatcgcaagtgcttaactcatagaagaagctgatggatttatgccagctactatttggattcagtttgagtgtgatccgctccccgataaagatatggttacggatgcgggtggagaaccaataatatcccgggggatacttattcggttgcttggcccagaaatcccggtcaaataggaaatttacgtagataccgcaacaaagaggctcgaaagatactttttctcccagatcgatattccaaggaaaatagttttgtttcaaggtgaaagtcacgtttgcgtgatcatttgcgttgcgggggacgatacccagcaacatatccgtttcccaatgattccggtaataattccaaccggtacccacggatagcatcgccatggaacctgcgaattgtacttttgtatagcgggggatgacccgttgccatgcgttctcgtaccgttgcactcgtttcgtgtatttatcctcttgcgcatggagtgtaagggaaaagacacaagttaagaggagaagcttaaaaattgaccacttcatacatataatcgtcaggggttaaggtaaaaagaagataacttcgtttggcgatattggcgcaaccgtagtagataatgccatcctcaaacaaatcagctgccgatacgcaatgattatgtgcatgcaagcagaacattaaagatggtaatgtcttgatataaagttggaacacgtctttcacgttattgtcgaactgttcgttcccgggaggggcgtgcatgactacgatcgtgcgtttattacgggtactatccgctatctcattctttaggaaattaaaatcgggtaccggatgggaataatcatactcgatagcgttcgtattgaggcatacgaatttcacgtcgctcacgacaaacgagaagttctcattcccaaagattttacgaaatacttggtcgccattaccgatcacgtcgtgattaccgatcaaccctacgtaaggcacttttagtttggacaagatatcatcgttccactcgaattccttctttaagccgaactccgtataatctcctccatggataatgaaatcgatgctatctaattgattaacgtacttgacgaaatcttccgtctcattataactccgctgggtatcgcccataaaaataaaacggatcgtgtccttcccttcgcagactttctcgatacgctcgatattggtcgggttgatctcccgggaagtatcggaatccagacgaccgtcatacggatgatagtcgattaagtcgcaagccgtgaggagtgtagcggcagaaagccatatgtatttctttaaaaacatagcatcctaacttttttatatgcaaagttaggatgctatcagtaccaaaaaaggtcatttctgagcttatactggtctaaaatgtatattctataaagcgaatacttgctttatttccgtgaagtcggataatacgatatcggcagtctcatttcctttataagcgctccaaccaatactttttagccagattgtctggcatccgatccgggtggcggggacgatatccttatcataggaatcacctacgacaacaatctcgtcggcgggaaatcccagtttatccactcctaatcggaagatcgccgggtccggcttacggatacctacgaccgccgattccacgatagcgccgaataaatgatccaaaccgaaatctttcaacacggattctatgttcccataaaagttcgataccaataccaatgggtaacgttccgctaattgctccagaatggggcgggcgctatcgattgccttccgggcgtattcgtaacaccaatccgctaattgttccggtaactccggggtaaccgcctcggcggataaatgcccattctctttcagccattggatttgtaaatcgcttttcaagcgcagcatatccagaaacgtatgatgaggcttcacgatcggattctttccaagcgttctttctccatgtacataagcatcacggaagaccgctttggatacgggaaccttcaaggcctcatacgccatccagatcacctcagcccagtgcatgccgttactgtctatcgttccgccgtaatcaaagaggattccttttactttgtctaatttgaacataatcgaatgggataaaaacgttataattgtttgctgaaatcttcacaaatatgctcatgctttttgatcatatagagcaacatcgagtttaatacggtcagctcgaatacgaaatacagccaaggcatgtcgatgaaaaggctgacaaacaaagcgatcacccgggtattgaatgatagcatatttgtatatttcatcaacggcagactctttgttcgaaaagccttacggaaccattccggcgcttgtccgttgtatttctcacggatgatgttcatcatgtgttggaatttaggtgtccatgcttcttgacctaccgtataattaatgtagaaggtctcgaacaatttatagataaagtcatgtttccaactcatcttcttataattctccttcaattggggagagtgggagagctcgctacccgatttacctttcaagaacaacaagtgaatattgcgataataatccgccatggccgcttgcttgctatggaagaatcccgtcgtagccgccaatagccagatccatattccccattccggcgtgaggcgtaagcagatagctgcgtagatagcgataaaccagaaatcgccggcggcaccgtccaaaatacgtcccaaggcacttttctgtccggtcatacgggccaattgtccgtctgcgctatcatacgagtttgcccagattaacagtaacatgccgatcacgttgatagcgaggctctggaaatagaaacagatacctgccgttatgccgataaagatgctggcgatcgtgatactattgggcgatacccccaatttattaaagaacaaagcccattggtagccaataggacgatagaaatgaatatcgataaactcctcggtgtccaaagattttaaggttgactccagactgggagtagacttagtctcactcatgattgattttgttaaaacgatttagatgtgttctcgcataagatcccagatacgacgtgcgatgtttggagccgcttcttcccggcaaggggcgaaactaggccaatcattgaaatcgataatccgcatgacaccatcctcggagacgatgcaatctcccccgtaaatatgtatgttcaatacctccgcagccttgtggcaaagcagacgaagctgcgcttcgtcgaaggggatccccttcgctgtaccattgataacttctaaaccaaatttactatgatgcatgttcgatggatagaaccaataaaagaaatcagtccccgctaccccataaaatttcaccaagtcgcctaccagatgctcattgattaccgccgacgggataccacggatggcgtattccttcagtatgcttctcgcctcttccggatttcttacgtaggtgacgtcttccctatgaatggcgtggaaatctccccgtttgatccagcaattaaagaaaccggctttctcaagggcttctgtcggatcctcatctgtccgtaagattaagcttgccggatgggagatatggttggataataggaggcgggtcattttctcacgagtacaattctcgatcccgtaacccgagttcaccacgaaataatttttatcctctagttcttgcagcttatggatggacttccagtctcttaccatattaaagatacccttttccttcgggtcttgtagcagcagatccgattcgatatattcgtttacatcgcatcccaattttcgtaaatgctgggctgtcaaggcgaagatcgccgcgtcgttgccgatatgattgggggagaattgatttcctctgcggatacctgctaaagttaatttactcattgttagacagtattctttatgactttaaaaatgattcggctttcaaaatgtcatcggcgtgatccacgtcgatgatcttgctgaaaggataggcctttagcctcaacccctcggcgatgagctgccgttgataattgcgcattctcgacattccctgcgagatggcgttgttcaatacacccagagccggacgcctcaagcaatagatacctcccgatatgtaacggcaatcatcgtctgcctgatctaggaaattccggatgtaaagttcgttgtctgtttctacatataagggtttctcgtcatcaataaaatcagtgacggccatcaatccgtccagtttatcctcttggatgaactgttggatatagccgctgaactcttcttccttgaagatcgtgtctacagtagttaaacaaatcttatcaccgtccagataatgactcagctcgtagaagctgtgcatagagctgggggtggattttaccaataggtaaaagggtataggtagtcgcagggccttcaggtaatcctgtacctcggtcatctcctcgtttacgatgatactgatagaggtagcgttatttttcataaaaacgtctatcaaccggtctatcagagcgacaccgttgagtctaaccagaggctttggccacttaacaccttcttgcgccaagcgggagccttcgccggcggcaatgatcgcgtaatccataacttttattagttcaaataataattttgcaaagttacgagatttctgagatagttttaggctatatcgttgatataattggtcaaaatttctataaattaggactatttgactagaacaacaaagacgttataaagagcttgaatgtttttttgaaaataattatcgttttatagttgctaattcaaatagaatgctttcctttgtgccatgaacaaaagatagtttgtatagctcttttatcttttagcatttattcatcagcgatgataatactttcttttagagattgacttcaccaaccatccttgttttattattaatttttattttttttatatcattttcgtatgaatatttacattggaaacctgaattatcgggtaagagaatcagacttacaacagattctggaagagtatggtgttgtagactcagttaaaatcattgttgaccgtgacacaaaacgttctaagggcttcgctttcgctgagatgcctaacgctgcagaggctcaaaaagctatcgaggagttgaaccaagctgagtacgaaggtcgtcagatggttgttaaagaagctatccctagacgttaaattttagaagaaagagatttttaaaataagacgaaaaagcggggaaacgaggtgaaaacttccgtttccccgctttcttttttcagtgtattttgtttatgttcgcgagaaattttaagagtgatgaagaatataggtgttaggagtctcattgtgggtctttgcttgatgggattggggagttggtctccctcgctgaaggcgcagatcgcggatcgtgtctataagacggattatcatatcgacccggagaaggcccgggagttgtccgtggagttggataatattagcttcttcaaggataacgagtatacgggtaaatttaccaaagggtattcgttgccggggctttgggtacaaggcaaagcggtttattatcccttgcggaatatcaagttggaggcgggtgtccatatgttgatctatcatggggcgaataaatatccgagcatggcttatcaggatatcgcttattggaagggagaccaataccaaaaaggggtacatgtgttgccctatttccgggcgcagatggccctctcggatcatgtgaacatcgtgctgggaaatatttacggcgcttccaaccataatttgatagagcctctttataatccggagttgaatttgacctgcgatcccgaggcgggcttgcagttgttgtatgactcgaaggctttcgacttggatgtgtgggtgaactggcagagctttattttccgggaggatgtgcatcaagaggcgtttaccgtcgggatctcttcacgggtaaagtacaacgacccggcttcccgtttccatttctatacgccggtgcaaggattggtgcagcataggggaggcgagatcgacacgatcttcaacaattccgtgcaaaccttgatgaatggtgcgatcggtgtcggaggtgtatggaataccggacatcgtattttcaaaaacttgaacgtggaactggatgctaccggttattatcagcaagcgggagagatatggccttttgacagcggatatggcttgtatgcccgtgcttccgccgatatctatgatttccgggtgaaaacgtcgtattggacctgcaaggatttcatctctatgtttggtagcccgtttttcggggcggcctcgatgattgatgagggggttacgttcgaccgtccgcaaatgatctatctgggggtggaatattcccggcaactaacgaagggtttctcgataggggtagatgtggacgtttttcatcatctctccggagatatgaatgatgcggatggagtaaaacaaccgatgggaagcgccacgagttttacggcaggggtttacatgcgtatcaatccgtctttcttgattaaaaaattctgatcattaccttcatacataaacacagtagtattcgattgtgaatactactgtgtttttctatgaatactattgtgttcagccgtgaatacaatagtgtttttattcaattactaaatcaatctttttcagtgtcttatcgtccgaggaacctccatataggatttggtatttacccgggcgaacctccatggtctgtgtattgtcattgaaggattggaaagctttcggttccaattggatgctaaccggttgtgcgctgccagccttcacgttcacacgtttgaatgctttcatcgcttttagcggtccggcgggatcgttcgggttcttgatgtagatctgagcgacctcgtcaccatccatcttgcctgtattggcgatatcgaaggagagggtaaccgattcgttggaagcgatcttatcctttgacaacttagcgttcttataatcgaatgttgtatagctcaagccataaccgaacggataaagcggagtctgcgtcatgtaacgataggtacggcctttcatgctgtaatcttggaagtccggaagctggtctacggatttatagaacgtgattggcaagcgtccggccgggttatagtctccgaataaaacgtcggccacggctgttccaccttcttgtccgccataccaagcgttcaagatagcgtttacatgatcgttctcccagttcaatgccaatgcgctacccgtacatactacgtatactacaggctttccggtggctaccaaggctttgaccatctccttctgtacggccgggatctcgatattcgtgcggtcgcctttccggaaaccttcagcgtctaccggcatttcctcaccttccagacgtggagatataccacctacgaatacgatgacatcagcgtctttaaccttgctggccgtagcttggaaatctacgggtgtgcgtacgcctaccgtaaagttcaggtcagcgctacccgtgcgttgcatatattcgatctttatgggatatttctcacctttcttagcgtttagcgtatagagtttttccgctccatattcgttttcccatacttcggcgactttagccgtatcgatatacaggcggaatgcgtcgtttccggatagtttgaactcgaccggaccatctatcggagactcgaactcgcccgtaaagcgagccgtgaagtttgtcaagtttacgttcggggcgaattgggtgttacctccggtggtataatgaagctctttcgctaatcccttgtaggcgggggtaccctcgaactcggtattgttgaagaattcggaggcgaagccttgtcccgccgtggaagatacgtggctacctaggtctgtcacgacaaaatcggcggtatggttgcaacccagctcgtagataacctctgcgttcgggactttattgcggataccttccacgatcgtgacggtcttggtcgggaagccgttgtagttggcccatagcatggtcgagtccgctgcgttcggtccgactacggcgatcttcttgatattcttgtccagaggaagcatattattcttgttcttcaacaaaacgatacttttacgtgccatatccagtgccttggcgatatgctccgggctctcgactacgctgtaaggtatcttagaataaggaacccgctcgtccggatcgaacatacctagctcgaagcgacctttcagcaggcggcgtaaggatacgtccagatctttctccgagatcttaccgtcggccaaggctttgtttagcgcacggtagctaccgccacattctaggtcggtaccgttcaatacggcgtcggcggatgcgctctcagcgtccgggtgcgtctcatggcgaggcgtatttttgtcttttctccagaaatcatcgatagcaccgcagtcggagaggatgatattgtcgtatccccagctgttacgcaagatatcgatcaataatttgtcgctgctacagcaaggtttgccctcaaaacggttataggcgcacattacctcttgtacatcgccctccttaaccaatgcctcgaaagctggaagatacgtctcgtacagatcacgaggagtagcctctacgtcaaactcatgacggttccattccggaccgctgtgtacggcgtaatgcttggcgcaagcgtgtgtcttgtaataattcggatcatcaccttgcaatccacgggttacggctacacccatcttctcggtcaagtaagggtcctctccataagtttccataccccgtccccagcgagggtcacgaaagatattgatattcggggtccagaaagtaagacctttgtaacggtcgtactccttgtccttttggtattgatggtatttggcacgggcctcatcgctgaccatcgtgaaggtctcgtgaacggcgttatcatcgaaggtagccgccatggcgatcgcttgcgggaatacggtcgcacgtccggcacgagccacgccgtgaagagcctcgttccaccagtcgtaagtcgggattcccaaacgctcgatggcgggggttacgttcatcatttggccgattttctcctccggtgtcagtcgggatagtaagtcgtcgatacgttcttccaagggaagatccggattccggaaagggtaatcttgttgtttttcactacaagaggcggtgagtaggagggtgatcatcgctactgtcagttgtttcattttcatgttattaaattttagatattgtttatcttacattattacttattgtaaactattttaaaatagatcgttatctttgatattgatggagcaaaactacgattttagaagcattttttcaaacaggaacacttaaaataggttactttagtggttattcatttaaaagccctatttttgccgtaacagattaaaacacgaaagaatgatgaagaagtatctatttttgttactaataggggccgctagcctgacggcctgcggagacgatgacgatcccgttgttccggaattgaataagctaacgaaagtttcttgttataaagacggagcttcaagcccgctttttaccgctgatatcaattatacgagcgatggcaagatctcaaatataaatttgggagtggataagttattgttcatttattcggatggtaaattctctgtcacaggcattcattccggtgaggttatagaggaatatacgttaagcggaaatgtaattacaagtaagaagatctctcaagagaatccatacgccagcaacgagatctatgtaagcgatgaatattcctatcgttattcaggctcgaattgggtgttgacttcttggaatgcccgttggccgaaagagtttgggacgggatacgaggagagaagttatccggagtacgagaaatatacatgggagaacggcaacgtggttctatatgcccagtcattggatagccgggagatgaggtacgagtatagcgtggcggaggctcctaagaacttccctctgcgagtgatcggttctttctcgccggttggctttgagtctgtaacacctctgaacttgttatatggtatccaaaaccggaatcttccgatccgtgcctacacctatacgatccctaaccagagcgaggtgaaagctgagtacaaatacacctataccaccgtgggagattatataacgggtatgactatcgatgagaatgacggaggaaccgcaagctcttataagtatactttcgagtataatttcgccgtgaagtaaggagacatgccttgtttggtttaattaacatacacatatgcagcatttccgccctaaaacgcatttctaattttatagaattaaaaggttgattagtttaattgataaacttagaaaggaagtattatgaacggattctttaattttaggaaattagttgtaggtgtaatggcggctacttgttttatggggtttcaatcttgcttggacgatgatgatgattatccttacagtaaagtgttgccgaatgcgttggtgacggttaagccggtcgatgatggttcatattttcttcaattggatgatagcacgaccttgttgcctgtcaatatgacctcttctcccttcgggcagaaggaggtgagagcgttggtgaattttgacgagacgaacgagtctagcggaatttacagcaaggccgtaaatattaattggatcgacagtatccttacaaaaccaatcgctccggatttgggggtgactagcaacgattcgatctatggctccgaccctgtggagatcgtgaacgattgggttaccatcgccgaggacggatatctgacactccgtttcaggacgatctggggagaccgcaataaggctcattttgtaaacctactgacaggcaaggacccggagaatccttatgaggtagagttccgccataacgcttatggcgatgtatatggcgcatatgcggatggactggtcgcttttaaattggatagccttccggatacgaatggtaagacggttaagttgaaattaaaatggaagtcattcgatggcgataagtctgtggaattcaattattgttcccgcaagtctactccggcaaaagcatctatagctgccgagagaagcgccttaaatttgaaataggtcggtttgatcgtttaaatagatggggatttggcagggagtgaatctcccttgctttttgaaagttctttcctagtgatagggaaggactttttttatggatagaaacaaaaaaggactctaagaagagtcctttttattcgtgggcagtgatggattcgaaccaccgaaggcgaaagccagctgagttacagtcagccccatttggccactctggtaactgcccattccaatatgttttcttgagcctcttgtcggattcgaaccaacgaccccgagattacaaatcacgtgctctggccaactgagctaaagaggcatctgttattcgtttgcgggtgcaaaggtagtaataatatcttacgatgcaatagctggaggcattttttttcaaaagggaacgaaaaaaaccgtccgggaaaactctcgggcggctcttctctacacgtaacttacatcaaattaaatcaatatctcttaccaacggtttcccagtcgataatcctccacaatgcgttcaaatgatccgcacggcggttctggtaatccagatagtaagaatgctcccatacatcgaatcccatgatcggagtcaatcccttaacgaccgggttactaccgttgggttctttggtaattgaaagtttgccgtctttatctttagccaaccatacccatcctgagccgaacaagcctgtaccggcggccacgaactctttctggaagttctcgaacgatccccacgtagacttgatagcctcggctagcttacccgtaggttcgccacctccgttcggggagaattgggtaaaatatagattgtgattcaatacttggccggcattgttgaaaatggctccgtcagactcacgaacgatctgctccagcggagcgttctcgaatttcgtgccctcaatcagcttattaagggtatttacatagttcaataaatgttttccgtaatggaaatcaattgtttgtttgctgataactggttctaaaccgtcgtttgcgtacggtaactggattaactcgaatttcataacttcttcttttttatctgttatttgactatttgtgatcattaataataaacttaaacataatgtaagcattgtcttctagttttttatgttgatttactatataaacagagccgaggggatgaaagttctgggttcggtgatgattttttagtgaaaatatgtttgcggctaaagttttatagggaaaactatgtgttatatatcgcaaaagtttctatttttgtgcgctcttaagcttttattaataagtaaaacatatttgtagatggtaaagaaagttgggaatttaattccaaacaccttttttattacaaaaggaagtggcgaatcagacttggagaaacacgctggttcttaccacatggctctttatgacgccggtatctctgattttaatatcatgacgtattcgtcggtgatacccgctacggcacatctggcaaccatggatgaactagaccttcctccatttggttcggaaatgaaaacgatcatggctgtatcccatggatatcaggatgagttcgtgtctgctggtgtggtttacgcatggatgtataaggatgagaactttgatgagaaggttggtggccttgtgtgtgaggtcagcggacgttaccgcatcgaggagcttgagtctcgtctgatccgtgttattaacgatcttcatcagaagacgtatgggaagtattatcttggagagcttaactttatcaccgagggaattacgatcgagaaacgctatggaacggcgttggccgccctttgcttcgtggatttccttcaaccggagatcgaggaataagtcgtgttgagtattttttgtgatatttatagagccggttcctttcaagagccggcttttttgttaactttgagcaacaaaaaacatataaatattgttttcgtgatatgaaaaagataattaatccgtgggaagggctggacggttatatgtgtttcggttgcgctccgaacaatccgctggggctgcatatggagttttttgaggatggtgacgatatcgtggcgttctggaagccgcaaggtacttaccaaggatggctacgtacgttgcacggaggtatacagactacgctgatggatgagttggccggctgggtggtcttgaggaagttgcagacctccggggtgacctcacgcctcgacgccaagtttatgaagagtatctctacggacgagccccaactgatgatacggggacggatgatagaccggaaacggaacgccatcttcatagagaccgagatctataactcggcgaatgagttgtgtacccgtgccgagatggtttatttcatcaccccgcaagaacgtgcgatggaggagtttggtttttgtgggtgtaagactgaggatgaaattagtataaataaaaagaaaagttaggttattatgaagtatgttggggctcacgtgagtgcggtcggtggggttgagaatgcccccgttaatgcccatgagatcggtgcgaaggcttttgcccttttcacccggaatcagaggcaatggaagtcgcagccgttgaaggcggacagtatccatttatttaaggagcggtgtgaagcgtacggttacgatccgggatgtatcttgccgcacgatagctatttgatcaatctggggaacccggacgccgagggattgcagaaatcccgtgacgcttttctggacgagatgacacgctgcgagcaactgggactgaaaatgctgaatttccatcccggaagccatttggggaagatggaggtggatacctgcctgtctcgcatcgccgagtcgatcaatatcacgttggctcagacgagtggcgtatgtgccgtgatagagaatacggcggggcaaggctcgaacttgggatataccttcgagcagatcgcctatattataaatgaggtagaggataagagccgggtgggagtatgcctcgatacggcgcacacgcttgccgccggttacgatataaagacaccggagggatttgccgagacatttcgtcatttcgacgaggtggtcggcttttcttatttaaggggtatgcacttgaacgattctaaaaaggagctgggatcacgtgtggaccggcatgagagtatcggtaaaggcttgatgggccttgataccttccgcatgatcatggtggacccccgtttcgacaatatgcccttaatcctagagaccccggacgaggcgctttggccggaggagatacagcttctatataaacaattaaaatcttgattatatgttcattttaatgcctgtcatttttgtcttaggaatcctcgctattgccttggaggataagatcaaaataaataaagcggccatagcgttgttcatggctatctctatgtggatgatattgatgttcgatgcctacaatattttcgtcgaacgctccagtacgatctttcaagagttcttgacccagaacccggagatggccagcttgcccccgcatgagcaatttattaattttatatcgaaccgtgcgattgtttatcatttaggaaacgtctccgagacgcttttcttcgtgatgtgttccatgttgatcgtggatatcgtggataagcatggtggttttagggccgtgaccgggtatatccgtacgccgaataaacgtaagctgttgtggtatataagtttcgctacttttttcttctccgccttattggataacttagcggccgctatcgtgatcatggcggtgttgcgtaagctggtaccggatcgtacggatcgtttgaaatatgcctgtatggtgattatagcggcgaacgccggcggctcatggtcgccgattggtgatgtgacgaccatcttgctttgggtcggaaagaatatctcggcgatgcaccagatctctcacgtgtttatccccgctttggttaatatgttggtaccgttgacgatcgcccatttctggttgttcaagaaaggatctactttgcgtgtgttgagcgaggaggagcaaggcgacgagtacataccggagataccgaaccgttcacgccggatgatcttcgtgatcggtgtgctttccttggcgttggtgcctgtcttccagatggtgacgaacttgccgccgttcttgggcgtcttgctgggattggtaatcctctggttctatacggatttgatgtatagtaagctgcacatgcatgagtcccagaaactccgtatttcccaattgttgccgaatatcgatttggctacgatcttctttttcttgggtatcttgatggccgtgggagcgctggagacctccgggcagttgggtatcatgtccgctttcttggataagcatgtacatgagccgtatctgatcagcttcgtgatcggcgccttgtcctcctgcgtggataacgtagccttggtagccgctacgatgggtatgtacccgatcgtggagcaggtggccgacttatcgccttatgcccagttctttgtatcggacggtggtttctggaccttcttggcttattgtgccgtgacggggggtagcatcttgatcattggttcggccacgggcgttacggtaatgggattggagaagatcgattttatgtattatacgaaacggttctctatcttggcgttgatcggctattgttgcggcgccggtgtatatatgcttttatttgcttaaaactttatttatatgaagaagagttggattttattaaccgcttgcgccgccctgttatctggggtggaggctatcgcctgtaccggtttgctggtgggcaagaaggcttcgacagacggttcggtaatgattagttatgcggcggactcgcattccctgtatggggagatgtatcgttggcccgccgctacatggccgaagggcgccatgttggaagtgaaggaatgggatacgggaaaaccgctgggcaagatcgcccaagtggagaatacctattccgtagtgggtaacatgaacgagcatcaggtggctatcacggagagtacgttcggcggacgccatgaattggtggatacgacgggtatcatggattacggtagcttgatctacatcgctttgcaacgttccaagtcggcccgtgaggcgatcaaggtcatgacggacttagtaaaggaatatggctattacagcagtggcgagacgttctctatcgccgataagaacgaggcttgggtgatggagatgatcggtaagggaccgggtaacaaaggtgccgtttgggtagcgatccgcatcccggacgattgtatctcggcgcatgccaaccagtcccgtatccagcagataccgtttgacgataaggagaattgcatatactcgccggatgtggtttctttcgcccgtgagaaaggatatttcaagggaaaggacgctgatttcagtttcgccaaggcttattgcccgtatgatttcagcgccttgcgtggatgcgaggctcgtgtatggtctttcttccgtaaatatgataccacgatggatcagtatacggattttatcaagggtgatccttccaaggagccgatgcctttgtatgtgaagccgaatcgtaagctttccgttcaagacgtacagaatggcatgcgcgaccattacgagggaacggatctggatatgacgaaagatgccggtgccggctcgtataaggttccttaccgctggcggccgatgacgttcgaggtagacgggcaggaatatacgaatgaacgtgccatagcgacgcaacaaacgggctttgtgattgttccacaaatgcgtaactggttgccggacgctatcggtggtatcttgtggtttgccgtggacgacgctgatatggcggtcttcactcctgtatatgcgtcggtaacggatgttccggagtgctatcgggtgggaaacggcgatttgctgaacttctcttggacttccgctttctggattcataactgggtggctaatatggcttaccacaaatatagcttcatgattcaggatatccgtaaggtacagcaggagttggagaatggttatcaagagaccgtaccggctatcgataaggcggctcaggagttgtatgccaaggacccggcggagactgtcaagttcttgacgtggtatagcacgactaattcagactccgctaccgcccgctggaagcaattgggtgagtatttgctggtaaaatacatcgatggaaacgtgaagaaagaggtgaacggacagttcaagcgtaatccgtacggccagcccgcatctcccgattttcccggatatgacgaggactattaccgtagcatcgtgaagagtgccggcgatcgactgaaagtaaaataaataccaataataatctaatgttgaactaaacgaaagaaagcgtatgaaaaagtttgtaatgatgctgatgttagcagtctttagtctgggagcttatgcgcagacgcagcaaggacaatctgccgtgggatttaacatcggttatggattcgattcgaagaatgccacgttaggagttgattaccgctattgtatcacggatgcggtacgtttgagcccgtctcttacttatttcgtaaagaatgacaatcacagcacttgggcgatcgacttgaatgctcattatgtagtgaagttaagtgagatgttcggtttttatccattagcggggcttagtctgtccttttggaattgggatgcgggccatggcctttctcataacgagactcgtctgggagccaatatcggtttaggcggtgaggtttatgctaccgacaatctttcgataggattggaggtgaagtataatatcatcaaggatttcgatcaggccatgctgggcgttcgcgtaggatatagtttctgatcccaatatagtcacagccccacggcagtactgccgtggggttacaccagtactgcttccggctctcgccgatactggtgtagcccattgccggtacaggcgtttcctttattccttcattccttcaccggctcctacacacacacgcacgtatacgcatacgcgtattattaatgtacgcatacatgtgtgtgggtgtgtgtaaaggggtaggtgaaggaatgaaggaaataatcatttcctttttctcgattgcttaccatctcaaataatcctcgaacgtgactttctcgaaattggggattacctcatatactttatctcttaaagattccgccggattcgtcgtacttaacccgatgacacgcatccctgcgtccttcccggactgtatgccgttgaaagaatcctcgaatacgatacaatcctcgggagatacgttcaagtctttcgccgccaatagataacacatcggatcgggcttaccttgcgtgatgcggtcggcggtcactagggtatcgaatagattgtccagatgtagaagcccgaaagcccgtttcaccttcgcattatccgagctggtaaccaagcctatctgtacgccgtgctccttcagcatacggatgaactcgatggagccgggcatgggaggcaagggcatcgtcttctcatactctgtagattctttggtcaccatttggcggaactcctccgtatatccggaaaaatacttctccagaatatacggtagggtcgtaccctttataatatcagcgaaattatcgatacctaagccataacgtttagcggcatcgttccagaataaatcgtaaataggttccgtatctactactacgccgtcaaaatcgaacaaggcggtctttagttgtttcatataaataatcatttaatatttatatcgcgaagatacgtctattttttatgaaatcaattatctttgtggacgcacacattgcttgattatatacattaaaaataaataagacatgaagacactagtaatttgtaccgccatgagcgctatgatcctttgcgcctgcggtggaaaaaacacgcaaagtacggaagagacagctaaggtagtaccgatggccgtaattacaccggcgatcaatcaattgaccgaccaagagaaagccgagggttgggcgctcctttttgatggtaagacaacgaaaggctggcgtggagcgcacaaagacgctttcccggatcacggatggatggtgaaagatggcgaattgatcgtgcagaaatccgacggtagcgagtctacgaacggaggcgatatcgttacggagggtgaatattccgcttttgagttcagcgtggattttaagatcaccgaaggggccaacagcggtattaaatacttcgtgaccgagcaagagaagcaaaaaggctccgcttacggcttggagttccagctattggatgacgctaagcacccggatgccaagctttacacgactttccccggtagtcgtacccttggaagcttgtatgatctgaagaaaagcgagaacatccatttcaacggcgtaggagagtggaatacggccgtggtgaaggtattcccgaacaaccacgtagagcactggctgaatggtgtgaaggtattggagtacgagcgtggcagcaaggagttccgtgatttggtgaagggcagtaaatacgctgatccatcttataatgcgggtggtgctttcggcgaggctccgaaaggacacatccttttgcaggatcatggggatgaggtagcgttccgcaatatcaaggtgaaggagttgaaatgatcgcctcgtgactaatttttcgtaacaaaagggtgccgatttaaaaaaagttgttactttgcggcggatttagactactaactttaaaagataacagacaaataccatgatttggaacgaaactattgaatgtatggaccgtgaggaaatgcggaaactacagagcctacggttgaaaagagttgttgaacatgcttaccataactccccgttttatcgcaagaaaatgcaggagatgggcattgctcccgacgatatacagacaatagatgatataacgaaattaccgttcacggtaaaacaagacttgcgtgataactatcctttcggcttgatggccgtgccgatgtccgagatcgtccgtctgcatgcctcttccggtacgacaggtaagcctatcgtcgtgggatatacccgtaaggacttgggtatttgggccgaggtggtggctcgttgcctgaccgcctatggtttgacaaagaacgattccgtgcaagtatcctatggttacggaatgtttaccggaggcttgggtgcccatgccggagtggagaatatcggtggtacggtgatcccgatgagtagcggtaatacccagaaacaaatccagttgatgcacgacttcggggcgaagggtttggcttgtacgccttcttacgctttgtatctggcggagactatccaccagtccggtattcccttggaggaattccagctacgtgtcggagcgttcggtgccgagccttggacggagaatatgcgtaaggaattagagacgaaactaaatatcaaagcttacgatatctatggcttgacggaaatctgcgggccgggcgtcggtggcgagtgtgagtgccagaacggtacccacctgtgggaagaccatttcttcccggagatcgtggacccgaataccttacaaccggtggaaccgggacaagtaggagagttggtcttcaccacgcttacgaaggagggtatgccgatgcttcgttaccgtacacgtgatttgacctcgctgacttacgagaagtgcgcctgtggacgtacggcagttcgtatgggacgtattttaggtagaagtgacgatatgttgattattcgtggcgtaaatgttttcccgtctcaggtagaatccgtaattttggagctgccggagttcgaggcgcattacctgatcgtggtggatcgtatgaacaataccgataccttccagatacaggtggaggttcgccaagaatactactcggatgagatgaacaagatgatcgccttgaaaaagaagatcgccgcccgcatgcagagcgtgatcggtttgcaaccggacatcaagatcgtggagccgcgtagtattgaacgtagtatgggtaaggcaaaacacgtgatcgataaacgtaagttagtataacctctaaaagattaagtactatgttaataaaacaattatcaatctttctggaaaacaagaaaggccgttttacggaagtcgccaagatattaggggaggcaggggtcaatatgtccgctttcacggtagccgagaattccgatttcggtatccttcgcctaatcgtatccgatacggagaaagcgatatccgtgcttcgtgaaaagttatacgctgtaagcgtggccgacgtggtatgcttgcattgtcccaaccagccgggagccttggcaaaggcgatggatatcattacctcggccgggatcttcattgaatatatgtacgctttttctcaaggcgacgctgctaacgtgatcatccgtccggacgatgtcaataagtgcgcggaggttttgaaagcgaataaattggaattgatcgctgctagcgatttatataagttgtaaatattaacgttttgggtttcatttattcgcctaaaagcactaattttgcacgctaaaagtatgtgaatgaaaaaggttgtatttttactgatgatgacagtactattatcctcttgtggagagtataataagatactgaagagcacggattacgaattgaaatattcgtacgcgaagaaatacttcaacgcgaagcaatactcgaaatccgctactctgctggatgaactggttacaatctttaaaggaacagcttatgccgaggagtccttgtacttgttggcgcaaagctattacggtcagaaagattatcagacggcttcgcaatacttcgagacctattatacgacctatccgaaaggggagtttacggaattatcccgtttctattccggttatggtttgtatctggactctccggatccccggttagaccagtcgcagacgtataaggcgatcgagcagttgcaactttatttggagtattatccgcaaagtgaacgggccgaggaagcgcagaacatcatgttcgagcttcaggagaagttggcttacaaggaattgatggccacccgcttgtatttcaatctaggtacctatatggggaataacttccagtcttgcgtgatcacggcgcagaacgccttgaagaattacccgtattccaagtatcgtgaggaattcatgttccttatcatccgtgcgaagtacgagttggcgctagtatccgtagaggagaagttgcagggccgttaccgggatgtggttgacgagtattacaactacatgaacgagtatccggaaggtaactacgtaaagcaggtaacgaagttctacgactatgccagcaagcgaattacagatgcatattaagcgaatttaatcaataaaacgaaaatggattacagaaaatcaaacgctcctaccaatacggtaacccgtgacatgatgaagttaagtgaagaaacgggtaacgtatatgagacagtcgctatcatttcaaaacgggcgaatcagattagtgttgagatgaaacaagatctggaaaagaaacttcaagagttcgcttcttacaatgacaacttggaggaagtctttgaaaaccgtgagcagatcgagatttcacgctactatgagaaacttccgaaatcaacgttgatcgccgctcaagagtacgaggatggcaaggtttattacaagaatcctgctaaagagaagaataacttctaagaagaaatatttttgaacatcggaaaggctgaccctcaaatgagtcggcctttccatttaaaacgaactaattaccatgttacaaagaatacaaactgtttacctgctaattatcgtggcgcttacggtcgctaccttattcttgccgttggccgtgttgcaacaaggagacgccctcttctcgttcgatgctagcgggttgagcacgatgatcggtgagccggaattactatacccggcgtggggcttatttgccttgactgctatcatcgctatcattgccttggtaacgatcttcttatataagaaaagaatcctgcaaatccgtctttgcgtgttcaacgcattgctgatattgggcttttatggtttcttcgccttcttgatctattccttgaagggggatatggaaggtgccagcgtaagtgttaagatcgctctttccttcccgttggtcaatctgatcttggattatctggcgatccgtaatatcggggccgatgaggcgctggtacgttctttggatcgtttgcgttaaggctttccggataaatcattgggtaaaagatattaggtaagggactctttttgtcaagggtcccttattttatgtccggaaaagtataatacataagacaatattattttgtatatgaaacaatattgtttttcggtgaaatatatctactttcgtagaatacaaatatccgttgcctatcatgaagaagactcagtttattcccatcgctttattgtcggtatcggcggtagcgaacgcccagagtgccagtcgtcccccgaatatcatcctgttcttggttgatgatatgggatgggaggatacgtccttacctttttggatccaaaagacgcattataatgaggtatatgagaccccgaacatggagcgattggcgaaagggggcatgatgtttacccaagcctacgctagcagtatcagctcgcctacccgttgcagcttgatcacggggacgaatgccgcccgtcaccgggttacgaactggacactttttaaggataagacgactgaccgggagagtgatgtgcttaccctgccggattggaattataacggcgtggctcaagtgagcgggacgaataatacgtttgtgggtacttcattcgtgcagatattgaagaataacggatatcacacgatccattgcggcaaggcgcatttcggggcaatcgataccccgggggaggacccgcatcattggggattcgaggtcaatatagccgggcatgccgccggaggtctcgccagttacctcggcgagaataattacgggcataccaaggatggtaaaccttacgctccgaacgctatccccggattggaaaagtattggggaagcgacaccttcgctacggaggccttgacgcaggaggcgatcaaggcgttggacaaggctaagaaatataaccagccgttttacctatatatgtcacattatgcgatccatatcccgattgataaggacaagcgtttctaccagaaatatatcgataaggggttaacggctaaagaggcggcttacgctgccttgatagagggtatggataagagtctgggcgatttgatggactggttggagaagaatggcgaggcggataacacgatcgtgatcttcatgagcgataacggtggtctttccagcgagcccggatggcgtgacggcgagatccatacgcaaaactatcccttgaacagtggtaaaggctccgcctatgagggaggagtccgtgagcctatgatcgtgcgttggccgggagtggtgaagccgggaagcaaatgtgataaatacttgattatcgaggatttctatcctactatcttggagatggcaggcataaaggggtataagaccgtacagccgatagatggcgtcagtttcatgcctttattaaaaggtacgggagatccttccgtgggacgtagcttattctggaactgcccgaatatatggggtaatgacgggccgggaatcggtccgacttgctcggttcgtaatggagactggaaactgatctattattacgagacggggaagaaggaattgtttaatatcacggaggatataggggaacataatgacgtggcaaggcagcatcccgatatcgtaaagcgtctgtccggggaattgggtacgtatttacggaaagtggacgggcaacgtccgtcgtttaaggcgacaggtaaaccggttccttggccggatgagatataataattaaaaaaagaaagagcatatggagttttacaaagcggaagagaatcgctatgcggatatgatatatcggcggtgcggacggagcggtatcttattgccggccgtttccttgggattgtggcacaactttggtagtgtggacgtgttcagtaattttatccagatcgctcacgccgcattcgatcatggcgtgactcatttcgacttggcgaataactatggcccggcctacggatcggcggaggagaatttcggccggatattgaagaagggcttgggcgcttatcgggatgagatgattatctctacgaaggcgggctacgatatgtggccgggaccgtatgggaactggggaagccgtaaatatttaatggctagcttggatcagagcttgaaacggatgggactggaatacgtggatatcttttactcccatcgtccggacccggagactccgatcgaggagacgatgggggccttggctgatatcgtccggcaaggaaaggctttgtatgtaggtatctccaactatgacgcggaccagacccgtaaggccttggccgtactgaaagaacataaggtgccttgcctgattcaccaagcccgctattcgatgttcgatcgttggacggaaccggatttattgcctgtattgaaggaagagggtgtgggtatgatagcgttctcgccgttggcgcaaggcttgcttacggataagtatttgcgtggaatcccggagaattctcgtgcggcgaaatcgaccggccatttgcagacctctcaagttaccccggaggccgtggaaaaggcccgtaagctaaacgaggtagccgcccgccgtggacagaccttggcggagatggcgctcgcttggttattaaaggacgaacgggtaactagcgtattaattggcgctagctctgtcgcccaattaatggataacctgaaagcgttagataatatctctttctccggggaagaattgcaggagatagagaacatcttaatataatgtgaatcgtatccgattgtagagacggggcgtgccccgtctcatcccctcaaaagagtatttaaagttactattagatggtgggagacggggcacgccccgtctctacagcctgtacaaatttttgaataaatgaaaccgttcttatatcaagtagcgtctcttttttacgagaaatggggagcggaggtcagtcgtctggcctttgttttcccaaaccggcgtacgggacttttcttccagaaatatctctcggaggtagccgatattccccttttctctccgacaatccttacgatcaacgatctctttatccagttgagcggaaaacaatccgccgaccggatcagtatgctttttaccctgtatgacatctacatccgccaaagcggttccactgagactttcgatgaattcctgtattggggcgagatgttgctcaacgacttcgacgatatcgataagtacatggcaaatgcccgcatgctattcagtaacgtgacggacctacgggagatagagaatgatttcgatttcttaagtgatgagcagatcgccgctatccgtagtttctggtccagtttttatccccggggcgatacgccgaaccagcaacagttcttggcggtctggcaagtgctatacgatctctatgaggaattccgtgcgaccatggccgccgagggaaaaggttacgagggcatgatcttccgggaggtcgtggaaagcatggaacggggcgagtctccggatttaccttacgagcgaattgtcttcgtcggtttgaacgccttgtccgtatcggaagaacgtttcttagcccagttgcagaagcgggagatagcggatttctattgggattatgtatccgataaggtaaccgatccggataataaggcttcttacttcgtctcccgtaacttgaagagcttcccttcctcgatgaaattaccccccgaggagaaggtaaagaccgagatcgaggtgatcggcatcccttccggtatcgggcaggccaagcacgtctacaccctgttgagcgattggtgcaaggaagcggagatgagttcggaagaagccctgcgtacggcggtgatcttgcccgatgaacatctgctgatcccggtgctgaacgccataccggagcaaatccggcgtatcaacgtcacgatgggttatcccttggcgggaaccccggtcgcctcgttgatcgagtatatcttggcgttgcagaagaacgtacgctacatagaccggaatccgttgttctatttccgcgacgtgctgccggtattgaaccatcgctacatcctctccacctcaccggagattatttcctccttggtgaaagagatcacggagaacaacaagatctatatctcgcatacggagttagggaaaacgcctttgctagaaatcctgttcacgccggtgaccggggtggaggccttctcggattatctgatcaaggtgttggaagagctgaacaaggttatgtccgccctttccgatgaggaagaggaggacgcaccccagcggacgaacgatttggagcaagagttcatcttccattatttcaccacggtaaaccgcatgaaagaggtaatgaaagacgctcgtatagagatgaaaatagataccttcttccgcctattgaagcgggtaaccgatacgattacgatccctttccacggcgagccgctttccggtctccagattatgggggtgctcgagacccgtgccttggatttcgaccgtctgattatcttatccatgaacgagggtattttcccgcagcggaaagcggcgaactcctttatcccttataacctacgcaggggtttcgggttgcctacctacgagcatcaagatagcgtatgggcctaccatttctatcgtttgatagagcgtgccagccacgtgagccttttatacgatacccgcagcaacggattgcagacgggagaggtaagtcgctttgtccaccagctgcattatcattacgaggtgccgatgcgagataaattggtggtctataacgtatcttcctccaagaccccgccattggccgtgccgaaaagggaggatatcatgcgccgtttagacgcttaccggaaaggggggagcaaggcgatctcggcgagcgctatcaatacgtatctggattgcccgttgaaattctatttttccgtcgtggaaggcattcgagaggaagaggaggtgagcgagacgatcgagagcgatgtattcggaagtatcttacataaagtgatggaggagctttacaagccgttccaagggaagatggttaccgtggatttgctgaaagcgatccgtaaggatacggccttgcttaccggagctatcgcccgggctttcgccagcgagtttttcaagacagaggtggttcgctcccttaccggacaaaactacctgatcggcgagatgatccgcaaatacgtggagaaaatcttggagcgtgacggcaagctgacccctttcgtttacatcgagtccgagcgtaagataaacggtctgatcagcctttccgactattccgagatccggttgaaaggctttatcgaccgtgtggacgaggttcgcgacgctatccgtatcatcgattacaagagcggtagcggaactacgactttcagtagtatcgagagcctattcaacaaggaggagaaagatcgtgcgaaagccgtgatgcaggtattcatgtattgctggatgtacgcccatctcaccgagaacaaaggaaagacgatacaaccgggcatttattacgtccgttcccttttcgccgatccgttcgacccatcggtctaccaccgtatcgaacgggggaagtcggagaaggtagaggatttctccggttatgcccaagcgttcgaggaggggctgcggggctgcttggacgagatcttcaatccggaaattccctttacgcaaacccctacggggaaggcttgttcttattgtccatttaagggtatttgcggtaagtagcatttgtcccggtacttcagggagagtaccggagtactccttgcgaagtactgtggtatttcttcggagagtactggagtactccttacaaagtactgcagtacctcttaggcagtactacagtacttcttgggaagtactgaggcgaggcttactgatgaggaagcaattccactatcttttccaaaaagatctgatcagtctcatcgaaactatccggttgatcactgtctatatcaaggacagcgattaccttatcctcccatatcacgggaactacgatctcagagcgtgacgccgagctacaagcgatatgtcccgggaaagcgtctacatccggtacgatgatcgtacgggtctccttccaagccgtgccgcataccccttttccgtatttgattcgtgtacaggcgatagggccttgaaaaggcgctaataccaactgattgtctatgacccggtagaaacccacccaaaagaaaccgaaagtttgcttgagtgctgcggcgacgttcgccatgttagcgattaggtcggtctcgttacctaccaatgaggcgatttgcgggagcaacgtctcatacatttcctgtttatcaccatttttaatccgtagttcctctgccatatttaaactattataaggtcgcgaatatacgaaacttgtttacatatgaatgatttttgcagaaataactaagcgaaattatatgtcagagtcagtgactttaaaaagttatttttacgaagtactaatcccttcgtcgcagaagaacacttcaagtcccatagaagatatacttcatcacgtaagtatatcttttatgaaaaagcttgcgctttacaaatgtttcaatccacgcacccacacggggtgcgacccaatccttttcaggacaggcttcggaagatttgtttcaatccacgcacccacacggggtgcgacacaagccttgctatcgcaccttaccggcttttgatggtttcaatccacgcacccacacggggtgcgacatatgagggtgaggttacgttgaaccagatcccggagtttcaatccacgcacccacacggggtgcgacagtgtgcaaagttacatattataagtcaataaattagacctattaatatgcgaattctcatttttatttcagcttaatggctgcaatcgccttatagacgggttaatctgctaattattaaggggtgcgaaaatactacttttttcgtaatactccacattcgcataaattatatgataagagcattattaactttgtaagcagtttcaacacctatcacttttacccttttattctcgtttttattgagaatataaaatctaacgctatcaagagacatatcaataatacgcttgattcgttcaatcaagagacaatattgtgcttctgtcacctcacactcaaagacagaattctgtaccctttggccataatctatgcaagccttagccacatgtcgtaggcggcgagctccttctttgctcgtagtatccacatcataagtcacaagaatatgcataatcgtaaatcattttattagaaataccggataattatcaatatcttgcctgatatatcttgccatcaacatggcctgtgcataaggcagaagccctatctctattttttcattaagataaggatggattatcacctcccttttccttgcctgccatgcggaaataaatgtctttttccctttatccgtcataacaaccccattatcaccttgaaacaaaaaatccttggatgttatctgtcttttattaatcaacgacaagacaaaacgatcaccaagataggctcgcaattcttccatcatatccaatgctaaggatgtacgtcccggacgaagtgtatggagaaatcctacgtatggatcaaggccaactgtttcgagtgcggcagatgtatcattagcaatcaaagtataagcaaaagacaacatggcattcactgcatctttaggaggacggcgattccggccatgaaacgggaaatcagccttctgattaagtatcaaaacaggcaacacttcaaaataggcatttgaagccatgccttcataccctattagggtcgtcttatcttgggtcgccaaagcttcacgcttggcatgttccaacacttgtaccgcccgattaatgttttcattctctccataatcacgaatatatctctttaatatattacgatagttttgaatcttaccaccaatcatcagtcgtgccacatgtaatgaccaggattcatcatccgacaattgatattgtctcttgcgtaacagtacattccctttcgttgcgctctgtaccctgctgataaatctgccatgaggagataggaatgtaagtgatatgctattgtcactgcacaatttcatcacgcccggacttgcgcccatatatccgaacgtcacaatgccttctatgtttatcgcaggaatacggaacacttcctcttgcttgactgatactacgacattctgcccatccttactcagataggcttcaggtgtcgtcacatacaaagtattcaacaattttctcatgtatataagtgtttattgaggtaagtatctaccgtggtacaattcttggctatcgtcggcatacagatttctttcaatgagcatttgtcgcaatgtcgttcatattttgcttttgggataacagccttactgaatatttcatgcatatccctggcgcattgtctgacgatattgcgcaactcatctgttatagccacctctatccgatgacgaagttctccataaaagaacacaccgtagggtatatggattgcgtacatttcttcaagacacattgtttgtgccgccaactgcacttcatccacttcatcctttttgggtctgccatgcttatactccacagccaccggtcgccaacgtcctggatatttaggatgcaagatcgtatcttccaaagatggagaaggtagcaactctatggcatcggaaatgccatagagccccaactcacgcgaagcgatattcactgcacgcaatgttatttgatctccacatttctgtctatagaacgggtcatccacatgtttatgcagaatctgtccctctatggtgagacggttatcatcccattgctgctcaatgtgaatcaaagcccattgccggggacagaacctgaagtgctgaatccccgacaacatgagcatatcgtcttcttcgtactgcatgaggtgcgggttaaattagttctttaacagtaacgttaggaaatctattttttaaaactgcttctatttcctctttggatgttactttgtagtcaccaaaggaacgaggaaattccactccttcttttttattgacttgtatgaggtcgaatagctgtccagctcttgcattgcccaacggagattcatgtttgaagacaatcaatgctcttgggttcatttctcctcttgctgctgcatgatcattctcaaatgcgttaattattgcattaaacagaatttctttatcctcttctgaaaacctcgtcttagcagcatctgttgcagaaatgaagccatgcatacggtacaaaccgtaacttactgtattcttatttccgatagtattagtgtgaccgtttttattttcatctttagttgtaacacaacagcgagtcaaactatgagattttgcgtcaacaggatcgatagaacgagcaaatgtcagttgaacaggaccgcgtaccacactaagtcccttaatcttcttctttgagtcttttttcttggattttttccctttaccaccctcttctgccttttcttcacttgaatcatcatccgctttcatatcgctggtactcattactgcaccaaaggtccgaatatcaaaatattgattacacatttcatcacgacctaacttgactgcttttttctcatcttcttctttcttatcggtttctgctctttttccatcaattatggtattcaaaacattaccctctcgaatgaaaatatcataaggagatttaagacctttgagtaactgcacataattacgaatcttacgcttgatgcatacatctgttactaatccatgattggtttcctcatcagtacgaggcatgttgtcaaaatcggggtcaccattaggatttccatcttttacatcaaagaggaaaacaaaatcataacgattcttaattgttgtcataattatatctgtttttattgttaattattattattgttattctcgttttgcttgacggcatattggtagtaatagcccaaagcgaattctcctcgttgagtgagggtgagtttatctggaaaattgccaatgcgtactgctatctccgtgatggatttactatatgctcccttagtctttttctgatatacagggacatattgagtcaacaatatacccatcaccctgcttggcgttttagatgctgaggcgaagaatctgtccttaatggagctattgacttcaccttgggccttgaactgtaatttgcaaataaaagcaaataagcgtccgcaaagatatgctttgctttcattttgttcgtctagttctttattcatataatatgtatttttaatgttcctatttaataccaatcggataactgttgatttctcaacgctgaatgttttgttaaattttgtcgtcttttcgtgttcaatttgatcgagaacactttgcagaatcattagaggcaaagatgtattagtcaatgctgcatgccataggatagctcctatccttgctttggcttttgcatcactctgtgtctgcttcgttttctttttgatgcaactgtttagaatgctgtttattcccggataggatatttcgccatctttaactgtttcgatatcatcgaaccattgcttcaggttcttttgatactgagaaacacttatcgccatccaatcccttacagcaatacgtgcagcagcagaggatatggtacaactatagaaatagttctcaacttcggtattgactctttgatactctcctgttgctattgatgagaagagttttcttactctttcttcggtaggctgacagatatctgagaaaggatcaatatcttcatttggttcttttgtccaaaacaaggcaatagtatcatcacttattttttgtcgatttgaaaacctaaatattttttctcctttttctgttgttatttcatgtccattcccaacgaggtattgaagcccttcaatatagtttcttgcacaattggtacatatgccagaattcaaattacctttgagattgtatgattcaaaggcattattattgtatgagaccaacatactacctgatgtttgtcctttgggcaacttaaccgatccatgagactcatcaagaataggatatgtatttgtgccacaaacagcgcacagattttcttgtttttttgaacataaggtatcttcgtactttttctttactgcatctttaacgcattcaagagaaaccagaagagttgaatcgatcataaaagtcatattacccttttgcttagcaggggacaaattcgaaaatgcttttagggccttttcaatctcttcaggtttattgtaaaaagaaaaaataggagagagttcttgaacttctttatagtcttccaactttgcgagatacttttcatacttatccttagaacctttaaatcctaaagtctcttccggtttatctaataataatcgtgctcttcccttttttgctggcagtttttctgcctctatagtgacatcacaaggagttagacccaaaaaggttccatatttatttataacaatataccaactgcatttttcttctttcaatgcatcatgcccttttcggattcttttcccaagttcaactaattctgcaatcatactaatcttcctttttgctaaattcgaacaatatgctatttacaaactctccttgttttgcacgcaaatgagaagtggaaagcatctgttcattaagttcactaggacaaattaatgtactattctgaacaacagcttcctgcatgtagataggtttagtattatggtctctgtcataccagatatcaaataacatgctacctatcgggtatgtcagattcagctcgtttgctcggtcttcatcctcttgcgtaactggaaagaattcgcatgagaattcacgtgttcccagatatggctgatgccaacattgacccttattcaaacgtcgtagaaacatatttcgatatttcactattggttcacaggactttccgccttcgcttttgtctctgttcttcaccttctggatatttgcttcggacatatagatatttgcttctatgatgtattcaacatcacgtagtacaatactatttctttgagctcgattcccagagttggaaatatcaattggtctgccactttgtatatagttaagttcattcctcttaaaagaagagaaaacaatgggcttcaatatcttgatgctctttaccacccattgaaactctggtttccataggatacactccagcacacctcttgcagcagagggtgtcatacagggataagtcattcgctctactttcagagcaggctgggtaaaacaggcgtattcaccctttacccttacttttacagaatttgtgtcaatcatatatagtaaatttcatcttcgttacttaatcctatttctttagaatatgccccaaaccaaattttaactccatttgatatctcgctaattttgttagcattagcttttgtaaaccattcataaacttgaacgcaatactgagcaatcttctgataatcttttcgacttagatattctttatcctttatttcgttgtacaagtgtttgctctcattatcatattgataaataaataatgttgttgtattactatttataatatggtacatatctgctacgtcctgaaacatcagcttttctcgctttggagtcacattgtcctttaatgaataattttttatgatatttgtataataatccgtatagaaatctgcatctgacaatctgtcttcattacctcgataacataactgtgcaaattgtgcaaatgctatatattgacgtgaaggctgaccttgatcctctaattggaacaaatagacttgaccttctttcaggttaccctctctattgcagcggcctgccgattgaatgattgattccaaaggtgccagttctctgaataccacagggaaatccatatcaactccaacctcaataagttgagtagaacacagaataagcttttctccttctttcaattttatccgaacccttttgatgatctctattctatgcgcttggcacatattggtcgaaagatggagtactggtatctcgcttcttgttttcaagcactcaaacaaagccattgcctttttctttgtattacatacaatgagtactgagccattttgttccaccacgcaatctgcaatgctttcgaacgattgggctttgtaatcatcaatggagatgtacttgactcgtttggtggaagcaaagacagatgcaggattctcgacaagcggtgtaatatgatctattccgcagaagtcctttctcgtctggaaattaggttgtgtggcaaaacattatcaatagctatcagttgtggaaaaagagaaaaaaagaactaataaattgaatgtaaatagttgatatgtagtattttattattgttgtatcttatttcctttgttttgcttgttttctgtatttagcctataaattcctttattttgttaccagtttgttacttagatagtgttgagtaacaaaaataaatactatatttgccatcagtaacaaaataaaaacataagtatggcgaagaaaaaacaagaggtcaaactgaaagaacctgtaagaatcagatttaagcagcttgccaatggtaatcaatccatctatttggattattacactggtgacgtaattagaaaagaaaactatgttggcggtaaacggcaatatgagtttttgaaattatatcttatccctgaaaagacgagggaagataagactaagaatgaagcgactttggcacttgccaaagctattcagagtaaacggattgttgagttgcagaatgatgcgcacggatttcaaaatactaataaatccaaagcaaacgtacttgattatttagtggatatgcgacagcaatctaaggagcgtggcagtctgaattacgaaaagactatcgggaatactatccgtgaattgaaattgtttagaggggattatatcgcttttcgtgatattgataaggatttccttagtagttttgtggatttcttaaagcaggcaaagaaagcgagtaaatacggagtaacaaaagcaggcggattattaagcaataattcggtagttgcttattatggagtattgcggactgctataaatagggcttataaagatggcattataacagtaaacccaacaaaagagtttgactttgccgataaagtaaaagcagaagcaagccgtagagagtatttgacaatagaggaattgaagttacttattgctacggagtgcaagtatgagataatgaaacaagcctttcttttcagttgtttgtgtgggttacgtgtaagtgatataagaaaattgaagtggaacgatttacagaaaagcggtgaaagaataagaattgaaatcaagatgcagaaaaccaaagaaccgctttacttgcctatatccgatgaagcgttaaagtggttgccgcaacaaaatgaagcaaaaggcgatgatttgatttttcctttgacgcatgaggggactataaacaagacacttcaaaaatgggcgaaagatgcaggagttactaagcatatctcgtttcatgttgcccggcatacacatgctaccatgatgcttacattgggggctgatttgtacacggttagcaaactgttaggacataaaaatatagccacaactcaaatttatgcgaagattgtcgataagaaaaaagaagaagctataagtttgataccgaatttgacggattaaaattaaagaaagtacggttagcataagtccgtactttctttctttttttgcctttgtttagtcgaaaaaatatatctttgtttctactaactgaaacataggatattatgacagaagaagaactgaaaataaaattcgaccatatacaaggcatctttaaccgttgtatcaatcatgccaaccaagtgttgacagacagcattgctgccaagtctgtatatctcaataaagaacaggctgataagctggaacagcaggaatatattcgtaccgctgatgagttagtacagttatatatacgttattccgtattgaatgatattcaaagtttttattcggtatctgacttcttttgggaaagtggtttttatgaatctttgaaatccgatgagaaaagaaaatacatgtcgtttaatcctctttcatttgattattcccggtatgaacaagataatacggtttatgatgaagaactgccttatttctccgtagtagtcaaagttgttgtgttagaaagatattcggcatacttgcgaaaaaagaaagaaaataaggtgcaagcggaaatgcaaccacaacaggaacgggaagaaccgcaaccaattcaagataaataccaagagcctaaaattataccccatattgctaaaactgaaaatccttttaagtctattttaaacgataggcaaatagagctattggtagagtgtatcaatgaagtagagattttcaatgtccctatgacttttgaagatttgaaagcgatacttgcctgtaaacctaaagttatattcaggtctaataacaacaggctggtagcttttcttttttcggagttaagcaatcatggtttgataacacctaactggcaatcggttatagcaaaaaataagttgtttgttacgaagaatataaagaaagataaatatctgaatcaaggtgatttagccacagccgccaattatgtaaaaggggtggaacatgaaaaagattatgtaaccatcagcaactatatcaaacaactgaaaaaactttaagaataggttaagacctcaaacatagcttaatccgctatcaagctattcctcaatacttttgcccccgtaatcgattacaagaaaccggagagcatgcactccatattgtctaacgcaaatacttttgttatatggaaacaagtattgagaagcgagttgcagaactcgaaaatttagtgttcctttcaaagaacgtgcttagcttcgatgaagcgagcaagttcttgaacctttctaaaagttacctgtacaagctgacttcgggtaacttgataccccattacaagccgcagggcaaaatgctttattttgagaaagcggaactggaagcatggttacgtcagaacccggtcaagacgcaggcgcagatagagcaggaagcgcagaagtatattcttaaccgtcctctaaagaaataacggttatggaaaatagaaaagcgacagaagccgggcagggtgtcaccatgcagaaagaggatttcgcagccctttggaaaaccattcatctaaaggtgacggacacttacgaagtaccgcccgaaatactttgggtgaacggctctaccattggcacgctgggtaatttcagcgcatccacgggtaaagccaagagcaaaaagacattcaacatttccgctatcgttgcggcagcgttgaagaatgacgaggtactgaagtattcggcatacctgccaccgaacaaacggaaaatcctctatgtagataccgagcagagcaaataccattgccacaaggtcatggagcgtattttgcggcttgccggactgccgaccgacaaggatatggacgattttgttttcattgtgttaagggaacagacacccgacaagcggaaacagataatcggctatatgctggagaacatgcccgatgtggggttgctcatcattgacggaatccgtgacttgatgtacgacatcaacagtcccggtgaatcgaccgacctaatcaatctcttgatgcgctggtcaagtggatataacctgcatatccacaccgtactgcatttgaacaaaggagatgataatacaagggggcatatcggtacggaactgaacaacaaggctgaaaccgttctgcaaatcacgaaaagccagcaggacggcaacataagcgaggtaaaggcgatgcacatacgtgaccgggagtttgacccgttcgcattccgtatcaacgacagcgcattgcccgaagtcgtggacggttatgtattcaagcagcccagccaagacaggggtttttcactggcagaactgacggagcaacagcacaggacagctttggaaaacggttttggcaaacaggttatatatggttatgagaatgtcctaaagaccttgaaacagggttatgcgagtatcggctacgagcgtgggcgcaatatccatgtggatttgaacaaattccttgtgaacaagcgcatgattgtgaaagagggcaaaggctaccgctacaatcccgatttccattattaaaaatcggtttggtttagtccgggtgtatatataagcggaacggacttactatttccctgtattggcaacaagtaggtttagtatggtacgggtgtatatatagcggactaaacaggactggcgcacttttcaattattctttcaaccattaaaagaaaatattatgaatatcgaagatataaagaaaatatccattgtggattatttgcacagcttgggctattcacccgtcaagcagcagggcaacggtttatggtacaaatcaccgttgagggaggaacaggaagcgtcctttaaggtgaataccgaccgcaatctctggtatgattttggcgcaggcaaaggcggcaacatcatcgcactggcaaaggaactttattgctccgaccatctgccataccttttaaaccggatagcggaacagacaccgcacgtccgcccggtcagtttttcttttccccagcataggacagaaccgagtttccaacatttggaagtccgtgaccttacccatccggcattgctccgttacttgcagggacggggtatcaatgtcgaactggcaaaaagagaatgtaaggaactccattttaccaataacggcagaccgttctttgctatcggtttcccgaacatggcaggaggttacgaggttcgcaattctttttttaagggctgcatcgccccgaaagacatcacccatatacggcagcagggaaagccgagagagaagtgtttggtattcgagggttttatggactatctttctttcctcacgctccggatgaagaactgcccgaccatgcccgaccttgacagacaggattatgttattctaaattcgactgtcaacgtgccgaaagccattgacgtgctgtacccgtatgaacgcatccactgcatgctcgataatgacaaggcaggatatgaagcgacacgggctatcgaattggaatactcctaccgtgtacgtgatttctcgcacaattacaggggttattcggacttgaacgattatctgtgcggtaggaagcaggagcagaaaaacagtatcagccaagcgcaggaaatgaagcaggaaaccggacaacgtaccgtcccaagacagaaaagaggcaggggcatttagtccggcagagttaccaacggcaggcggtttaatttggagagcaaggttatgtttcggtagaccgaaaccaccttgctttgctgaccgcaaagaaaatttctcccgttggtcgcaatttttaagataccatttaaaagcaaaaaagtatgacagacataaaggataagccgggcggtcgtccggcaaagaaacggatagacaagcagcaacgggtagtcagtacgaagctgaccgagttacagtattacgccattaagaaacgagccggagaagccgggttgctggtcagtgagtatgtacggcaggcggtcgtttcggcagaggtcataccccggctgaacaggcaggatgcagataccatccgcaggctggcaggggaagccaacaacatcaaccagttggcgcaccgggctaatgccggaggtttcgcactggtggcggtggaactggtgaaactcaaaaacaggattgtcgaaattataaaccagttgtcggatgattggaaaaataaaaaagggaagcgggtttaagggttgcgtaaactatgtgttgggcaaggaacaggcggctttgcttcatgcggacggggtattgacggaaagccggggcgatataatccgcagcttctgtatgcagaccgggatgaatcccgacttgaagaagccggtcggacatattgcgctaagttattcggcagtggatgcacccaaattgacagacgagaagatgatacaacttgcacaggagtatatgcgtgaaatgaaaatcaccgatacgcagtatatcatcgtgcgccatcaagaccgggaacatccacatgtacatatcgtgttcaatcgcatagacaacaacggcaagaccatttcggacaggaacgatatgtaccggaatgaacaggtgtgcaagaaactgaaagccaaacacgggctttatttcgccaaaggaaaagaacaggtgaagcagcaccgcttgaaagaaccggacaaatcgaaatacgagatttacaacgctgtaaagaatgaaattgggaagtccaagaactggcagcagttacagcagcggttagcggaaaagggtattactatccaattcaagtacaaggggcaaacgggtgagatacaaggcatctccttttccaaaggtgaatacacgttcaagggttcggagatagaccgcagttttagtttctccaaactggataaatgttttggggatgtagggcagacgacagccggaagcaataagcagacggttaccgtacctattcagaaatcagtatcagcacccgacaaagcggataattcttttattgcaggtttaggcggtctgttttccggtttgtcagccccggctgatgaaatgcccgatgattcctttttgagaaagaagaaaaagaagaaaaaacaactaaagttataagcgtatggagaataatttgattttagaggggcttctctcaatggttactgaactgaaagagaagcaggaagcacaggtaacgccagccagccgggaggaaaccatcgaacggctggatgcaatcgaacaggcattgtcggaactgcacagtgacccggctattcccgaaaaggaattgcaggctatccaaagccagcttgacgatataaggaacgggatgcaaggtcagcggaaacatatcgaggacaccaagaaaataacattggaaacttatcgttgtttcaaggctatggttgaaaccttgaactcttacaagacggaaaaagagaaagtagaaccaatatcgctttatcagcgaatttataacaaggccatttcttgggttcgtccggaattgtttcttttttcggcagtgctggttatctgttccgcttccatattcttgaatgtccgtttggctgaacgtatgcagcagttgcaggacaacgatataaaataccgctatttgctgatgcaaggacaggcagacggagaaacttttgatatgctggaaaataaattcaagtggcaccgggataaccattttatccaaagtgttaccgattcagtgatagattttgaataccgtagccaaaagcaagcggaagcactggaacgtgcaagactgttgaacgagcaagccgagcaactaaaggaagaagccgataagttggttaagccataaatggagaaagccggaacggatgagacacattcaccgtttcggcttttcaaattcacttctttttcttcgtgcagtgttctttctcgaacttgtgcaatgtggttacgttaaacctttccttgatgaactcccggacatcggaagccttgtaatacacttttccgctgattgtgaagtatggcagcacaccgatagcccggtagcgttgcagggttttgatacttactttgaacagtaggcacaagtcttgattatccaacaggttatcatcttcgggcaataccttgtctgcattgcgcagtacccgtatgtccttgtaaagttcttccagtttggcatataatttctgcatccattcgctgaactcgttattttctatatacatagtcgcttcatattttagattataccttttgtaatttgatgaagcaaagttcagaaaaagagtgcaaggtaattacgagggcgcacatggaatccattataaataaatcgtaaatcgctgattatctatatccttttttatcgtgttcttttcggataaggtctgccagtccattaagaaattcggtaagtttgcccggtttacgctttattacatcctcatgcttttggtggcaatcgtttattttgatgttgaacaaccattcaaaacctttggataagtccaccaagtaggcaggtttcccgttctgatatacgatgtttttggagaggaatagaccgcttaccatttccataatattgataagggctgttttatcagcgaggtagagaggggaaagtttttgtttttcaatcacctgtttgagttgttccggatacttgatacgccattcgataaggcatatttcagtgtttaaaagttctatcgcttcatcaataagatgcaaatagggcatttttttcttgctcaaaccgtacacggtacgatttaagacgatgcaagccaaaagaaaaataacggagcaatatgctataatcctgttcgttgatactgaaattggctacatgtgtagccaattcctcaatagcttctgtaaattcatttacagaaactttacgttgcgaatattccgacaataatcggaaaaatctctgttgcaataattctttcattttacaaactataatgattaaaaataggtggtgtaggcgttaaatcgtaataatccaattcactaatagcaagacgaaaataaactaattctgaatatgaatgatataagcgtattagaactggatttgtttcatagatttcttttcctatattattggaaacatcaaaaagagcttttccctttactcttactgaaatatttccagccattgcgagtaattccacaaaaggatttttttgcagttgctgataaacttctttatgggtagctgttgcaaaataaagtatgtctttatttcttttcattatttggaagacgcgaattttaggtttatcttcctctactgttgcgaaagctacgtctttgtgttctgataaaaaacttaaagcattttccatattgcatttattttaaacaatataaggctaccaatggcaaccttatattaaatgtgaaattctatttttacttgtacaaaatattagccaagtctgataatccagcctctccgggtaaattaggataagcctttttcatggcatcaataaatgaatcggctgtattatttgctgcaattgtacgtttcattgttttcagatagttaatcttaaattttaccatattgctttttgcagccccaccgtgcccaccaataaaatattcgcatccagattttaaagccttttctgcttctgcaatttccgcatcaatcgcagctaaggaagatatttgtaaatggctgatgtgagatttagcaggtgcccagtgtgtataataaaccttgccgcctattataatacttgctgccggaaaatctgttgaagctccttgttgaaaagagaacttcacaccaccccaattttgggtacttcctaaagatacttcctctgcttttccggttggcatggggacaatggcatcaccaaacatctttgcaaaattctgcatcattccaccataaatagctcccttgacaaattccggcattccctcaatcatcacaatatcatgatttcccgtgccacctacatgataattagtgataattttctgtacaggcttattcaatgaagtcacataggtgttgaattccgatacattatccctaaacagaggttgttccaatgttacaacttcgtcattgccctctataatgtagcttgcatctccaagtgcatcatttgtattatatacatgcagtttaaaattacctaaatccaatacttcaaaatttcctttagtctgtgcttctgccaccattgctacaaaggtcagcaagaataaaaatacgttcttcataatttctatattgttatcattagtaaccgatggtaaaacgctcccagtgatgatttgcctgttccatttcatctaccattgcaactgcataatcttctactgaaatgtggctgtttccgttttcatcaacaataaggtcgtcctttcccaaacggaattttcctgtacgttgtcccggttcaagagttccggcaggtgagaaaaacacccagtcaatttctttttcattgcacaatgtatttaggtagaattcacctaaagacttcacaccgcccataatttcagcaggtattgcacccgaatccactactctaagccccggagcgcaaaacaaagtacctgcaccaccgacacacaacaaccgcttaatgcctgcttgctttactgctttgaggattaatggatagtttttcaacgtctcttcgtaaatattggggtttgtccagccgggattataagcgctgataacaatatctttatccttacaagtggcagttattgtttccacatcagatacatctgccttaactactgataaattactgttgctaattgtaatcttttcgggattacgaactactgctgtaactttgttacctctgtttaataactcactaaggattgcagttccaacaaaaccgcttgctccaatcaatactacatttttcataactataaatatttaataatcaatattactatctaaaagattgtttatctcttttcggatgcaaagatgaaacacttttttcagttatacaagaaggcactttgtactcagatagttacctgtatgaaactattgttgattatgaagaatttgaaaaatacatgtttaacactatttagctgattactatttcacccttgcttatttgaagaatgttagttacttttgtagtgcgaattgaaatataatatattatggtaagaacagaaattcaaaatgaattatatcccgattgtcctattcggaatatacttgctcgtataagtgataaatggtctatattagttctttttacattaaatcagtctgcattaatgcgtttcaatgccttgcaaaaaaatatccccgatatttcacagaaaatgctgactgttactttgagaactcttgaagaggacggatttgtcagaagacaggtatatgcagaagtgccgccaagagttgaatattcactaactgatagagctatatctttgttgccacatatcaacagtttgataacttgggcaaaagataacatggatgcaattttagttgatagagaaaataatagattaaagtcataaacccaagtttagtttgtgcctttgcctatatagccaaaacggactaaacttatttttattgatagcaaaatatatatgctggcgaaaagagaagaagaaaaaatacctttgttttctttttgccagcattatttttgtacttttgtcgcatataacaaagcgtaaatggatataaatcagaattatagagaagcagtaaagaccataaaagaagctatcctacgtagccagtaccgtgcagccgcatcggtgaacaaggaacagctctctctttattacggcatcggacgttatgtgtcggaaaattctcgtacaagcttttgggggaaaggtgcaattgaacagatatcttccctattacagaaagaattgccggggctaaggggattttcaactcgaagtattaaaaatatgcggcaattttatgaagaatgggaacttgttttaaatcagcagccagtggctgccgatttggagttggatgaaaaattgcttctcatagaaattcggcagccaatggctgccgaatttaactggtctgatttcctttcaatcggctttagtcatcacatagaaatcattgccaaagctaagactttggaagcaaggctattttatatacatgagtgcgctactcgctattggagtaaatacactttaagggattatttaaaagcagacctgtacagccatcggggaactttacctaataatttcgtccaaacattgcccgatactaagcaagctctaaaagctgtttgttcatttaaagatgaatacctgcttgatttcattaatgtggaggaactggatgaacaagaagaggatttagacgaaaagatagtagaaaaggcgattgttgccaatgtgaaaaagttcatcatgacctttgggcaggatttcagttttataggtaatcaataccgtattgaggtagcgggagaggaaatgttcattgatttattgtttttcaatcgggaacttaattctttggtcgctgttgaattgaagtccggaaaattccgaagctcctatttagggcaactgaacacttacctttccgcattggattcatatgtgagaaagccgcacgagaatccctctatcggaatcatcctttgccgagaaatgaaccaaacctttgtagagtttgcagtacgtgattacaataagccaatgggtgttgctacttaccgggcatccgaagatatgccggaacgacttcgcaaagcattgccggatattgatgaattgaaaaagttgttatagaaaacaagtttagtccattcttttgtctatatatccaaaacgaactaaacctatttctattgacagcaaaatatatatgctggcgaaaagaaaaaatagtattcttcttttcgccagttttacttttatggttagagggcatttgttacctttgcacatgaagcccaccataaagcgatttcttcgttttttttgttactattttgttacccgctgttagtaataggtgggctttccttttgataatcaatattgtatgctgttgtatatataatatgtggcagtacaaaacaaaaaactacatcggcaaagatgcaacaagtcattcagcatcttcattgtacattcggcaaggtttactggcaatgtttgaatctcatcgaagatcacaattgaatcttgcagattgtgtaacttgcggcatttggaacgttgattagagaatagagactcaaaaaattgaactgcagtagtgattactataggataatcccagttttctgttgccaaatatttggaatctttgcaatagctttcttcttcatcggcttcttcatagttcacatttgaatgatgttcaagtatcacatcataatctttgaatatggttttaagttcatttgcagtctgatcaatgatgctgatgaatggcagaacaatcactattcgtttgatgttaggatgtgcttcagcatgatagagagcccagtttaggctggtcaaagtttttcccattcccgttggcaatgtcatggagaaacacccttggtctgcatttgcaagactttgggcataaagccttacatttgtcctcaactcgttcagaggagtaacctgtttgaaagaatcgaaccgcttgttcaaggctgccaagagcgcatccacatcaagaattttgcatgaacgtgcatcatactgttctttttggaaatgtcgctccgtatcaagactatccgcatcaacaagtgcgctataaagcaatcgtacaaatagttccttttgaaaaacatttcctattttattaaatgaactattgtcacacattgatataatgaaatcatcttcttccatagcctgctggatattcttccacctgttttcatctttcgcacatagtcctaatgtttcaaccatagcatctctattgggaagtcctgcatgatgtcctattacaggaaatgcaatattgacaagtttattcattagagctatataagccccccattttgcatgaggttccttttcttctcttgatcttatataattttgaaatcccttgctgtatttgccaatatcatgcagcaagccacaatacgaatatatctcggcaaaatcatccgccaaagcaaaagacctcatcaattctgcgacactttcactatgttgcttcattgactgctctgcaccattactattttcagaatgtgcaatatatttatatttactttgtttcattatatatatccactcactggtgtcccgttaaattttcattcatgttattttcgaataggattataaagataatgtttcatatccttatcgtcaaacgtgtttttcctgcaatacaactgataaaaatactctgtcatcgtagaagggtcaaaccaatcactatttgcaggcaaattcaatcgtgcattgtttgcagccttcattgccccaaatggaatacgtttctctgcggcgagactgaacacaaatgtggtaccaacagtatttcttccttcacggttacaacgccccgctgcctgtaaaatagagtcaagacctgattcctgtcgaaatacaacagggaaatctatatccacccctgcctctacaagctgggtagctatcactctgacaatcggatgtgatttatctttcagcaatgccttgaccttccgtatggtttcactgatatgggcgggacacatcattctcgatagatggagctttattccttcattaggtaaacggtcatacagttccttggcatcctttcgggtatttacgatacataatactttattatatatagcaacttcggcggcaatctcatcgtatgtctttcctgtgttgtctattactaacttcacacgacgaagcttgtcatgcaaagcaaactcattcggtatgatttcaataatacggtctattccctcaaaattggccttaggattagttccttctatcagtccgctaagtaccggctgactggcagtggtaaacagtaccgacactccgaatattttctgatatgctttaagtgcatccactatcggttgtaagaaatcagtcggcaatgtctgcgcttcatccaaaataagaactgaattcacgatattgtgcaatttacggcaatcggacggtttgttgctaaacattgactcaaacagctgaacattggtcgtaacgataatcggataatcccagttttccgtggctagctttgccttctcacgtacctcttcattctttatctcatcaggattaaagttactatgatgctccagtacgtgctcttcgccgaagatttctttcaagaggcctgccgtctgcacaataatactagtgtatgggatggcaatgataatacgattcataccgtgatttacagcatgcttcatggcccacaacaacgatgaaagagtcttgccgcctcccgttggtaccgtaaggctatagaatcctttctcttcagaagaagctttacggcatcgttcctgtactttcttgcgaatgtggttcacttctgtatcgggtgcatacaattgcagttcacgtaaatgcgcctccaattttggcaataagtcagtgagtgtagacgagcatccccgtttttcccacgattctacatccataaattgctctgtattgagtctgtcggcatccacaagacaggaaaaaagcatgcgggaaaggtgatgaaaatgcttcatgtccaccttaagtttagaaaaaggagattcaagaagttcttttctcaactggggtatattcagagctatgtcccctttgtttatctcttcgggaagttgccttttctctatgacgctctccgcatctacataatcatgtaggcctgtatgatgagagattatctggttggcaagaagattgaatacactcttccccataaggttcgttaccaatattccacctacaaacgcatgatgatgctctccatacgatttttcgtcagtcacaggtagaccgcttgtcgtacggatatattgctgaaatgcatcacgctcttttcctttgtcgtgaagcattccaagcgtatgcccccaagatggaagtccgaacagtccagaaaaggaggttgccatttctgcaacacccctttgatgttcatcgttggtttgtattatccattttccattttctttgttttggtataaatgggatatcaactgtttctctgtttccatttgattagattcataaggttataccttacaaaagtaggaaaataaatcgaaatatccgtatctttgcggcatggcaaaacaaaattctccattggtattagggaccgagcctatcggtaaattacttacgcaatatgcgattcctgcgattatcgctatgacagcttcttctttatataatatggccgatagtatttttattggccatggagtgggggcgttagcgatttccggcctagccttgacctttccgttgatgaacttggcggccgccttcggttcgttggtgggagtcggtgcctctacgttggttgccgtgaagctggggcagaaagattatgagggggcgaataaggtattggggaatgtgttgatcttgaatgtggttctgggcgtcgctttcacgatcgctttcttgttcttgcttgatcccgtgctgtactttttcggtgctagtgagaacacgatctcatatgcccgtgattatatgcggattattctgtatggcaatgtggttacgcatatgtatctgggattaaatgcggtcttgcgctcctctgggttcccgaagatggcgatgtatgctacgttggcgtcggtcgttatcaattgcgccttgaatccgttgtttatctttgggtttggatggggtataaaggggtcggcttgggcgacggtgatctcgcaggtaatctcgcttaccggacagttgatccatttctcgagaccgaagcaactccttcatttcaagaaaggtatttataggctgcgctcggagatcgtgaaaggtatcttgtcgatcggtttatctccgttcttgatgaacctttgttcctgcttgatcgtgatccttatcaaccggggattgaaagagcatgggggagatatggcgattggcgcttatggtatcgtgaaccgtatcgcttttcttttcgtgatgatcatcatgggatttaatcagggtatgcaaccgatagccggttataattatggtgcccgactctattcccgggtgacggacgtgacccggctgacgatgcgctgggcggtaggagtggctacgctggggttcttgctttgccagttggtgccgtcgtggatcgtccgtatgtttacgagtgacggggagttgatcagtgccgcctcttatggcctgcatatcgtcttcgccgtattcccgatcgtgggcttccagatggtggcgactaacttcttcctttccatcggcatgtctaagaaagcgatctttctctccttgacccggcagatgcttttcttgataccctgtttaatcctcctccccccgttattcggaactctcggtgtctggatcagtatgcctatcgccgatacggtggcggcgatcgtgacggcgatcgtgcttgtgaaacaatttaaacaattcaaatatggaacataacgtgatattacctgcggaatggtatccgcaaagtgccgtgcagcttacgtggccgcatgagaatacggattgggccccgatattggacgaggtgattccttgcttcgtggctatcgccaaggaagtgatcaagcgagagaagttattgattgtctgtccggacgagaccgccgtacgtgaacaattgggtgaggttgattacgaccgtgtcattttccgtgagatggatacgaacgatacgtgggcacgggatcacgggggaatttccgtcttcgatgagggaacgcccatgctttatgatttcgtgttcaatggctggggaatgaagttcgccgccaatcatgataatctgattacccgtaacctttgtcatatgaagaccttctccggtgaggtggtgcccgctaatatgcaacctttcgtgctggaaggcggtagtatcgaatcggatgggaaaggtacgttgatgactaccgttgagtgtctggcatccgtaaaccgtaatgagtatttgcaacaggaggaattggaacgttatttgaaagacgtatttggcttggatcgtatcctttggattaccagcggttatttagccggagacgatacggatagccacgtggatacgctcgcccgtttctgtagcgaggatacgatcgcttatgtccgttgcgaggatgaggaagacgagcattatgaggaattgaaggcgatggaggaggagatcaaggagtttactagggcgaatggggagccttatcgtctgattccacttccgatggccgataaggtggaatgggaaggggagcgcttgcccgctacctacgctaatttcctgatcatgaatggggccgtattggttccgttctatgactcaccgaaagatgagatcgctaaagcggctttgcgggaagcgttcccggaccgtgagatcgtgggtatcaattgccttccgcttatcaagcaacacggttccctgcattgcgtgacgatgcaatatccggaaagctttatcgaataataactacaaccaattaaatatgaaagtaggattaatacaacaaaagaataccgctgacagagcggcgaatatagagaagctaaaggtaaatatccgtaaggctgcccgggagggagcggaattggtcgtcttgcaagaactgcataacggcctgtatttctgccagacggaagatacgagcatgtttgacttggcagagacgatccccggcccatcgacggaaaccttcggtgccttggcgaaagaattgggtatcgtcttggtgctttcccttttcgagaagcgtgccccgggcctgtaccataacacggccgtcgtcttggagaaagacggtacgatcgccgggaaataccgcaagatgcatatcccggatgaccccgcttattacgagaaattctattttacccccggtgatttaggctttgagcctatcgatacctctgtggggcgtcttggtgtgttggtttgctgggatcaatggtatccggaagcagcccgtttgatggctatgcgtggcgccgagatgttgatctatccgaccgctatcggctgggaaagtagcgatacgcaggaagagaaggaccgtcagctgggtgcgtgggtgaccatacagcggggacatgccgtggcgaacggactcccggtcatttccgtaaatcgtaccgggcatgagccggacccttcggggcaaacgggcggtatccggttttggggaaacagttttgcggccggtccccaaggtgagctattaaccgtattcccgaatgacgaagaggaggtacgtgtgatagagatcgacaagacccgtagtgagaacgtgcgtcgttggtggcctttcttccgggatcgccgtatcgatgcgtttggtggtttgacagaacgatttttagtataatgaccgaatacacgcaagaagaggccgtcttccgcatgaacgaaatggggaaagcgggacggcctttcctttttatcattgattataaacgagagcggatctacgtggagagtccggaagagatcgttccctccgagttattgtacgacttgaacggctttacgaatgcgaatcacgaatgtaacttgcgggattcctctcatcttatatccggagaacctgttgaatggcagccctcgtatgtttctttcgaggagtatgcccattcattcgagaccgttgcccggcatatccatgcgggtaattcttatttggtgaacttgacatgcgctactccggtacatgcgaatctctccttaaaagatatcttctaccaatccaaggcgatgtataagctttggatgcgggatcgtttcgtggtattctcgccggagatattcgtgcggacgcgggatggtctcatctattcgtatcccatgaaaggtacgatcgacgctacgctgcccgatgcccggagacgtatcctcgatgatcccaaggaagcggcggagcatgccacgatcgtggacttgatccggaatgacttgagtatcgtagcctccgaggtttgtgttccccggtatcgttatatcgatgaactgcgtacgcataacggaagtttgttgcaggtcagctctgagataagaggccggttgccggaaggatggaacggacatgtcggggagattttgttcagcctcttgcctgccggctccatcacgggcgctcccaagaaaaagaccttggagatcatcgccgaggcggaaacctatgagcggggtttctatacgggggtgatggggtattttgacggccaagatttagacagcgccgtgatgatccgttttatggaacaagtctctccccattcgtttgttttcaagagcggtgggggaatcacctctaaaagtgatgtgagatcggagtataacgaaatgaaacaaaaagtatatgtgcccatctattgagaccttatctgggagtccgtttgtggagacgatccgtatcgagaagggacggatacataaccttccgtaccataatgcccgtatgaaccgtacccgcagggagctattcggagcgagagaagaaattgatctcgcgggttatattcatccggggcctcatcaagaacgtaccaaatgccgggtggaatatacccgcgaggtcttacaggtagaatacgttccttaccgtatgcgtccggttcattccttgcgattggttacatgcgatgagatcgattattcctataagagtacggatcgtcaatgcttaaatgatttattcgcccaacgagggggacatgacgatatcctgatcatccgtgacggtttgctgaccgatacttccatttgcaatgtcgccctttggaatggcacctcttggatcactcccgcacgccctttgttatgtggtacgatgcgtgcttacttattggataaaggcttggtacaggccgaggatatcccggtagaggatctgcctaagtatacccggatccgtctgtttaacgccttgatcgggttcggtgaaatcgatgagatcacgcgtatatacgtatgaccctacgcgagtatcggcgtggccctgtgcctatataggtaaggggttacgccgatatccgtgtggcctcttacctatataggcatgaatcaaggtgtttcctagaacaatatatccacctccatattgctgatccattctaccggacggccggccaccttattgcaagtgacggcgaatttcaaggggaggataattcccaacgggatgcgtaaccatcccggcatattgaaattatggacaccgatcagggaacctagctggataccgaccgagggagctaccaagaaacgggtctcgtcattacggcggtctatacccatctcgaaataactatacaggccgaggaaacgtttcggggaaacgaatatatccatgttataattggcgcccgccttcacgttccagttcttgatcgtgtaggaggaggaaggggcgtgcatataataaccggagatcgtaggggatacccaatgagcgatgtcgcccggctccatgatcatgcctttccctttcccgaacttatgccaattgatcatgctgacgttcaagcgaccgccatacgtcatgacaccgtcccggttgctatggatcggcgtaccgatcaggaacatgaaggagttggctaccctcgaccggataaagttgcgggtaaaaggctcttgtacgatcagctgtagctcatccttgcggtcggcgacggaagcttccaaggggacgtcatccagatccgtcccgaaggggatcgggaaatccttgattaccgggaaacgatcgtagacgaactggggcaggtcgtctcgttcggaagggatctcgttcaagatattctcgcctgatccttccaaagcattctggtaagctttccagacttctacgatagactcgcaggtggcggtcacgacttggtagaatactttcgtctcccgctcgtagctatcgcctttctccaaggaataagggtgcttctccgtgacccggatatgccggtaatcatcggcctcgttgtactccatcatgttttggttcaaacgtttatcgccgtaagcgctccaagtctcaccctttaggttggcagtctgtacggggatggtattgtagaaatcgtgcaggctcttattgttggatacggcggaggcggagaagcccctacgtaccatttggtgtccggaggcgaaggagtcttgtaggaaatgctcggcaaaagcctcgtacatcgtggcgtagaacataaggttgctcgccatttgcgtatctcctttacacatctctttgcctgcctcttgtgctagatagatggcgaagatgtggatgcagaaatacttgctcatggagggcaactgatttaatttatcgaagaccttgtttacttccgaggggcgttgaaggcggcggatcagctcggggtcgatcatcttcagatgctcgttcaatcccttgccataggcgtagaagtgggagagatccttgatcgccaggataccgtaagccagattgatgtcgagcagctccttgctgttggctccggtgaggaactcgttcatggcttgtgtctccaaagccagcgtacggttcgtcttggagaaatgggtctgcaggcctgtctccaagagcatgggattttccacatggtcgccggccaatccgcaaagcgtaccgtaggtcacgatattcggcaactgtgtcagctcattcatggcgtaggcgttcgagccgggcatatgcgacatgttgaggatctgcagcaaggcgctatcggcgacggcctcgttggggaagatcccgttttccaccagataacgcgggagaaggctcatggcacggtcgccgatcttacgatgctcggcgaaatcccatgcgaaggccgaacttgttattgcgctgatacccataagtaggcatccgcggtgaagaagttgtttaatagtgtttctcttgttcatatctatacttgtttataattatctgaataactcaagcgcgaacttcaacccgacgctttgatacttgaactcctcgaagcctaggaaaagcgctatatgaaaaaggtcgctaccgataccatacccgagctcgctgtaattcggcaatacgggagtccatagctggctgaggtagaaacgttcggacacgaggtatttatgcgccttgggattgggcttgaggaatcgcaatagaatgaatgggctctcgtacatgaggtgcccttgaatatatttgtcggaggcattgcaccaatccccacccagattatgaaagatcccgccaaaccggtcgccccaaggctcggggaaataacgtttggcgaaatagctgaaatcggcgaagtacatgttatgctggttaaaaaagagtccaccgcttagattgtaactcagtcgttcggataagcccagccgtacggtctggttcatgccggcctccatccgccagtaatttcccgtacagccgagtaggtccggtatgcttcgtgccagctcgatccggaaggtcgggtaatgggaatgcaggtactctttccggtagccgtccatccagtaatattgccggggcgtgtaggtaaggccgataaccggggtgaactcattatgatcctttagatccaatccggtatccttgttctttttcacgggcgtacgatggtggtatgcgagtccggccgagagccggaagccgttcatcagttctatctggttcatcagcttggcatagtagtgctggaaatacttcaagttgagatcgtcgaaacggattggggtatcttttaggatctcgttgatctggtggatcactttggaggaatagctttggttgtcattggctatcgtgaggttgaggatgccttgacgctcggggtgatactcccagttggttgttagccgtaggcgtagctctttctccttgaataggaaaccgatctcggggtggaagcgtagctgacggtcatgctcgaatgtcttactgatacgtgcttcttgcttataggtgatcccgttgcttccgaaagatagctggaacaggttgagaaggccggaatacttcacgcgagtactcttgtaatccttgttgaccgtgctggtgagccgctcgccgagttggaggtagcgggtgagaacgctgctgtccgcttccgtcctcaccgcgttcgttccggtggtgtacaaggctttctcgtcggtagtgagcggcttgtccctccggctgttccaataagcgctgtcttgggtaaaggagagtgtgtcggaggtgatcgtatagtattgggtttgatcaagcgagtataatttcctgctctcatggtcttcctctacccaagagatcgatttatagcggaaagcggcgtggatgtcgctctctatccggttgcctagggcatggtagcagacttgcaggtcagcctcttccgggaggatgaaatgcttctcgtcacggttgaaacgtatgcttaggttgaactcggagaaagaggagtgcccttgtatctcgatacggtcgatggtccagagttcgtcggttacgtacaggtttccgtatagtagtttctggctccattggcgaggggtgaaacggatgttatacacagggatgccggagatcgtgtccgtgccttcctgccgaaacgtgtaatatttgaaagcatcgggcgagagtggcatgatcattcccttattgtagatcgtgggggagtagacgttcaagttgacgaacgaggctatctccttgtaatgccttccggcggcgagatggctgctgttgatggctacaatcttgttgcgataatggttgggagcgtcgtagcgggtgaggccactcatctcgaagaaggcatcgcggggatgacgctctatcgggaagaccagataggcgtattgtagcagcttgttcttccggggaacgtgcgtacggcctttcacgtaggtctccgcttcatagctctcgaggacgtgctcgtagatgggggcttgatggattacctgccgcatgatggagtcggctcgtgtgacgggtgtcttctcttgtgcccgcaggtctgaatggactagcgggcacagaagaagtatggatagtagaataaggtgtcccgtctcgatcctcatcctgttaatgtatggcgaaggttgggcatactaatgcgcaaagatggcagccgacacatttttgctcgtctatcaccggtttgcgcatagaggtgaaacggatagcttgatgtccaccgtcgttacaggaaacgaaacagcgtccgcagccgaggcataggctgttatctactgtcgggcggtgtatctgcgtacgttccagtttctcggggggtacgatgttcggtaaagcgatacctatgaggtcggatagggttttatatccgttctcttgcatgaacagtcgtaacccttcgcatagatcgtcgatgatccggaagccgtattgcatcacggcggtacatatctgtaggttcgtgcagcctagtagcaggaaatcgagggcatcccgccaagtctctataccgcctatcccgctgataggcatcttgccggcggaaggatcgctcgccagctcatgtatgaaccggagagcgatagggcgcacggctttccccgaatagccggacacgctgctcagtccgcagacaacgggccgggccgtaagcgctttctcatcgatacgggtgatacatttgatggtgttgatggcggctatcccggtggctcctccttcgtgggcggcgagcgccacgggtgtcatctgcccgatattcggtgtcatcttcgctagtatcggcagatgggtaccccggcgtgtggcggcggtgaaccggcgtaccagttccgggctttgtcctacgtcgctgcccatcccttcttgcgtcatttgtgggcaagagaagttgcactcaatgatatcggccccagcctgcgtggaatattgggcaagccgtgtccactcatcgtctgtccgtcccataatggaggagatgattaatttgtcaggatagcgttgcttgaggcgatagagagtatcgaaattctcttcgacagaggcttccgacaattgttccatgttcttgaatccgatgaaaggcacgccatccacctccatttggtcgaagcggggggatacctcatggctcggatagaatgatatcgtcttgaagcagataccggcccaaccggcttcgagggcccggacgcacatctcgtaattatgggctacgggcgaggaggccagtataaaggggttggcgcagcggacaccacaaaagtcgatcgccaagtccggagacgaagtgaggggagaactatccgtcgggtttggcatatcttgtaattgccgtacgatctgggtgatggatatcgcccggtcggttcgtccgcggaggcaggccttctcgcaaggatgcccgtcgcaatccttgcaggcttccatccggtaggcccggaggatagctcccgctaggttgtccattttacaggcccgcagcaagcggcccggatctagtccgggcttgcatgccttcgtgcagacagggtcatcgcacagataacagcgattcgattcttccgttaggaggcgttttctctggaggaggtttgtcttcatggcttctaactgtattatctcactactttctgtactttccggtaacgttcggtcacgacctccacggtgtacaggtgtccgggcaggctgaagattgcttttccggataccgcttgctggtgaccagccaacgtgccgttcatgctgtagacgttgacggtggctcccggcaggcaatctaccgtaagcatgccgtcgaggaagcggatagacaggggctcgtcggtcgttacctcctcattgccagtggcgctcacgtcacctcgtacataggtgatgttgttgatgtcccacgccaatacgaagggtttgtcgctgtttaccatgaagggaaaggtgtcggtgccgaagctgatcttccgttcgagtagcttggggtagtactggtcacggagcgtgttcgacttctcggcagtgagcagatagagggtggatgagaaggactcggctgtctcttccggcctgacgtgcttgtccgtgcgtcgtatcttcgaataggatgcgctgataccctgcgaggttgtcgctgtggtctggtctgtccattcccaagaactttggttctccagttggaagaaggggaatttcaaatccataaggctgatggcacctttggtctgactgtcggagattgtgccgctggtttccagcgtcatgtcgatccgttcggagttgaggctgaagttgacggacttgctgacatttggctcgctggcggtcatggtgaggatctcacgggcctcccagtctccaagtttgcttggattgtctatgcggaaaggctctaggtcgagaggcacttctacttgtttgatactctgccgtgtcatgtaagtatagctgaatatgggcattcgtacactctgtctccgggtgggggagaggtattctaggtcgcaacgggtcagaatgggtacagagtagagggcgatggcccggtagtctgctgtgtcgtttgcttcgaaggtaacggtgatggactcggactggcttgttacttcctcgtgttgtttctggaaggagtatccgccgccgaatgctgccgtgagtttatccgtatgcggtccgaaggagcatttgaggtcgcttttatagagtcggctcacggagttgctggtgcccgatcccatggtgaaggcaaggcttgaggctacgccgaggtcgccgaaccactcgttattatccactaccgttggaggtggtccttcgatgatgccgacgaggcgcacgagattgcgtagctcgctgttgccgaacagggccttctcgtcgttgaaggaactgcgtctctctacgatctcgttggagcggatggaggcgatgtaggcgtgcttgtaccaatggtatggagtctggttacctcgcagcaggtagatatattgcttgtagtagagccctccgccgggagctgtctcggtggtaggatctgccgcggtggctacgaccgtgtagccgtagggcaggtcggtgtagatgggtgcgtcggtggcgaagctgttgctgccggggtagaatttctttaggaagtgttcgcccgttcccttgccatcataggtacagtagctgaagatcaggggatttgaggaagctttgtagccgctggtattgtcggctgcgtagccttctatatcggcttggatgagcttgagcgagaaggtcttcgagcgtcctatgtcgtgatgcgcgtattcttcccagttggagggccatatgttatccttgccatactcgccgctgtagctgaatgcctcgaaggtaccgctcttgagtcggcctatgatgagtttctccacgttctttttctcggtgtcgtcgtagccgtaccacgaggtggcgtcccagtggtcgtcgggatcgtattccattgatatgcctgttgagccttttagctcgatattatcgtgtccggcgttgcgcacggtgccgcaccagtcccagccgctgttcagctcggggtcgccgtattggtagacttgcagtttcttgttggtgcggcggtgtaggatgacgcagatcttgtcacggtagatggtggcggcgaagttggcgtaagttttcccgtcatcgagcatacgagttttcttgtattctccctttttcatatccacctcgccgatccatatctggccattggtattattcttccagagcacatagaagcgattacggtatacgatgatctcggcatcttggtatacgccgaaatcattgagaaagatcattttcttaccggtgtcgccaacggtggattgttccattgtccgggtctcgccgttcacctcgaaagcgatgaggcgtatggatgaggggccgttattatctatgtagaccccgtagagcttcccttggtagtattgtgcgtcggtgaagcagtaataggcacctccgtctttatccatattgtggaattctttcaccttatacagttcgggatgttggctgatctgtgccttgacggtggtggtagaggcacagataagcaaaaatatggcgatcagccgtatcgcttgtgctttgagtgtcgttctcatgtatatatctgtttaagaggtttagaaactgatattgaattgtaactgtacggactgcctcttgccgaagcttccgtttactccgagcgagatgttgtcagcgaggaaatagttcaccccggccaaagcgtacagcttgtgacgggcgtggaaggtctcgtcgatacgaacggtatagtcctcgccggcatatgtcttggtgaactcgtaccggtctttcatcgtgtagtccttgtagaggatgccggcatagggcacgaaattgcccagtgcgtatccggccaccacgggcacggcccactctaggtaacggcggttgaggctgaggtctcgcaaggggatggtcttgccttggtaatacacctcggtggtcatgttatcgctgttggcatagcgcacgccgggttgggtagacatgaaaaagcggtcggtgaaggcatagccgtaacctagccctccgctgtagatgggtaccatgttcttgctgaagatggtactgcttaggtcgtcatcatctcggaaagtctcctcgtgggtgaagttggtggtaccgatgcctgcccacaggctgagattgtcccatacacgataggagaggcgcagggaaatactgttcatgatgagtcggtgacttaccgagtgattgtcctcgtcgatttgttcggatgtccaattctccgggtttcccatctgcccatcttcatctacgccaaatgacgtggtggagagccaaggggtactggtatcgtgacttccgttgatctgtaagttgaaacgtttttcccccgtaggatatttgtctaaggggatcaatatatccgccttggcttgatagacagtaaaaacggataagagtaggagtgtaaaatgtctcatatcgctatttatttagttgaatcatttacgttgttataatataggttggcgaagtactcgatgggagtgttgcccgtcacctccttgaattggcggtagaaagaggtacgggaggtaaacccagccgtcttgtataactcctgcggctcttgtgtgaggcacttggaaaattcccgtatgaggtactctacccgatagatagccagccagcgactgaagttcatacccgtctgattgttcaaggtagaggatagccgggtacggttcgtgcaagcgaggttggccaactggcacaaattgaactgtggatcgagataaggcttcttatcctccatgatttgtaaaatgcgggcatatagcctgcgttcgattagggatggcttttgcttttcttccatattggtactgtcttaagtaacccgcataagagggacttgcgaggtcaaatatagacagtcccatttggtaaatcaagggatgagaaaagatgcgaacgtattgaaacttgatccgaacgatctggtacaccaaaggccgtaaagcccctgcatcaaaggctagacacgtactttaacagattatttgccggtctcttttcgtacgtttctgtattggttgggcgtaagtccggtgacttgccggaactgccggaagaaggaggttcgggaggtgaagcctgattcggaggctagtgcggtgatgtcgctgtcgggacgtagggcgacgagcgaaaggaggtggtgtaccctgtattcagccagccaacgactaaagttcattcccgtctgcctattgagggtggtggatcgttgtgttcggttagtacccactagacgggagagggtcacaaggtcgagattaggatttaagaaaggcttttgctctttcataactgataggattcgttgatataggagattatcagcttttgttgtgacctcggtgtttgcctctgaatgatctggtaactttatttgtggccgggagattagcggaagcggatcgtgtattagcaaccaagccgcatgatggcttatcaataaatcgaataactggcgtaggcgacggcgatgatttctccaccaaaggtatcctccggttaggatagccatgagcaaaataatgactccggtaaggatatactggatgagccgtgcctgttccgcttccgccttctgactttttaagcgggtggataatagttcgttttgcaggctttcgctgatcatctttctgcgtatgttcatttgctcttgggcataatgggattgtagggagtctgcccggtttgcctgttggatggcttccgattgatttccggtcgcataatggcattcggacaacatacgtgccacacgcaccttatattcctcgatattgtctttgttcctcaagagaggcgtggcgacattattgaatgagactctgtctaattcctccaatacggatagtgcctctttgttttttccatgtttccggagagagacggcgtattccatgaagagttgatattgcagatagctgatcgtgtgtatttggtgtttcgcctgaaagtggcggatatcggtaatgcatcgttgggtccattcctccgcttcggcggtctttcccgtacggcttaatgctatagcttttactaagtgaggagagcttatcactttatatttcaagttcaccaatgctgaatccgcatagatgagtgcttggggatataatccacattcaagacaagcgctagccgccgtgatataccagttttgaggatttatatatgcatattttcgtgcctcgtttatccatcgctcgcattctgcgggttggcgtatctgtgcgtgaagaaatgccatacgcaggtgattcatgagaaggtgcttgtcttttatgcggatggcataaggtttcatgcggtcgagtagcattctcgcatgtgccgtgtcctgtaatctgcaatagcgggtgtatatgatttggcgggttgccagcaaaagcgagtcattccctatttcttgggcatgggtttctatctcttcgcatagctggtcgttcaagggaccgctcaacaaagaataatcattcagttgcgctatttgctgatccaattgctgcttgggtggaagaagagagtgggagtcgcaggcgtaaaggactgacagtaggaatatgtaaagtatgcttgttttcatgatgtcatagttttatttgtaattccagaccgaaaaaaggctgggtattttgttgaaggtaagatctcgtgctggccgaatagcgagtggggcgtaaatcggcgaggttgttggcaaagaatgccagcgtgatgtgctctccgaaagctttgtttacccgaatattcagcataccatatggtttataagagtttggcaggaatcgttccggcgcagtggtggagagtaaaggcgcgaaggctggatcctctttctgtgtctcggtgaacggatgtatgattccgtctgttccacaccaatataggggccatacattctcgccagtgctaccgttgtagagcgtacgatatttatagagccatatcatttgccacgtaagggtagtgaccagtccgatttgggggatgcgggtgatgaaacggaagttcgtggagatgatctccgaacgactttcatttcccggtccgccttgcttgtcgtaaaaacctacgtaggggtattctgttttatctgtgtactggatcggccagatcccgttaagggccgtattcttttctcgtacatataaccagatcccgtctacgattagggaggtacgcaagggtgagaaagtcccgaggtccgctaccatctcgatcccatgtttcttcctatggaatgtattgactggtacagataccggcgtgtaactatatttctcttgataagggacagccttaccgttcacccatacctgtccatttttgtattcaggacgaagttgggcggttgatagataatcatattcccgatagctgaatggaatatattgcgccgaggaggaaaagccatccgtttgtttctcgaaaaaagcggtcatgtcaagtcggatggccggagtcttccctataaggccaacctctatctttcgatttacggtaggttttaatttcatatttcgttccattccgggggcatgtgtcgtgagaataccgagggtgtttccattttcattgctatcattataatagaaagagaccttatcattataaatagcttccgggtagagtttttccaatgtcggcatgaaactgatccatccgaccccggcttttaaactcaatgtatagccggagggagaggagcagagagaccataagagattcaggcgaggttctgtctgatagattaaggcataatcccggcttttcaatccttgatttcttaatccggcttctacatggaggttggaagtccggtatgtggcctcaatgaagccaccgaacgtatgcaaggacgggatttcccggaatgagcggggacggatagatgtagaaggaggcctctgccgatcgaaatccctgcctcgcccttcgttaccctcactacggtatgagaatccggctactaagctgatctccctcccttgtcgtagagggaataaggtagacgccagcatctcggtttctacataaaaaggttggctttcattgactaatgtgtacatgtagtttgaggataaaacacgggcttcccattcgccgctctctttctggtctgtataaagctggctagaggcattgttgacctgactctttgtttgtttgcttttttgaagggaaccgtctattctcagagacagcttcttgagccaacgtcggtcgggttgccattccccttgtatggaaaatcgctgatccaatcgttgtctttgtgtatgattctgctcgttgacgaattgcttttcctttcctatgcgagaggtgtaagtaaggcttaattctagttttttccctgcgggcaaccaatggtaaaggtttgccaagcgtatgccgccggtatggaaatcgccttggctggtatagtccgctaacaggttgagcgtatggccttgtggggagatacagaagccttttccaagcatatattgtttcagtttcggattgtaacgtatgctggtggagagaggcattctaccttgatgagtcttgagtaataatacgctatttgttaagtttccgtaccgggcagaaggtattccccggatgatttccgcctctttcacttggttgagagatagaaaacgggcatcatatccttcgtaaggctcgttgatgccggtgttgaaatgaagaggagagccgtctacccatatttgggcacccatagctgcgttcttatgaaattggtttaccccgttctttaaagaaacctctcgcactgagaaatattgtgcgtctgtcaccccagaattattggtgagacctcccggtaataattgtgtcagatcagagatcgtgatcggttgcgtatgttccaacgttgacgctggaagcaaggaaaccgtacccggagtcttagactctatggctgttaccaaaatgttgggtaaatagaaggacagagtatccggttgcttttgcccgtgaaggtaattgcccggatgaagtgatgacaataagagaaatatcgtcacgatctttattggtgttttgtacaaagttgagtaacgcatagtattaagacctattatagccagatgacaatactgagatttccgccccctccgaggggcgattgaggacttgtcgtttgttcgagactacctattaaacgaaatcccgctgataaggcggaatgaatgggatgccgatattccatttccgcaccgatacccagacgggttgccgtgcgagcaataaaatcctcgttcactttttgcatgttctgctctagcttgatttctgcagagccattctcatccttctgcgtttccttctcccatttgatctcggtgccatagcccgacacgatatacacggacgggcggatacttagcttgttttctttaggtaggcggatttgtcgaagaaacgcgatctctccgtggaagagccctgtatattgtttgaccgtaaaaggatatatgtagaaatcattttccaaacgattccatccgacagtcatttgccatgtggataccttttcgcccgaagtatcattctttgtcgcctcgtaacttagttgggtagataacatccgttgccttgctaggcgataggtggcgaatgtagtccatatggcagacgagcttgtggtgggattccgttgtaatatgcggttggccgtagtttggttgaatcgggctgtgggcgaccagatatgcgtccacgatttattcgttcgggtaaaacgaccttggtaactgatttgatgcagccgttcttcccagcctctcaagttgccggagttatttggattgtccgctaattgctgggtctcgtagaagagatcatggaaaagactccaatgctcttttagggtttccgtttgcaaggaaacacctaggcgttttccttgactgcgaaacaggaaacttcccgataattcttgcatcggaagccaataacccagaggaaatgtataaagtttatctttactatccgtatcatacgttaattcctctgtacgatgggtataatggatcgagactccaaagcgtctgcgtacttgttcgtaaacgatacctcctgatatccggattaagtgtgccatcccatggtagatatggtaagaggagcgatcctcgttgcttgtagctgtatagtctccatctatcccgaccttgattttcggggataagacgtaagccgcttgtccgtagatcctgtatttctcgatgcgttgtggctctcccaaggaatcgccggccgtaatcagatagtccggttgcgataataaattccattttctcccttccagtaggctttgcgaccaatcgataccacccgccagccaaagtagacccagctttcggttaccggatacataagccctataggtctgtgtttgatccggctggtcgctggcaggtaaggaggcttgatggatcaaataacttaaaccagcttccatagcgctgtccttaggtacatagctgatgctgacaggattggcggataaagcccatgcgctctcttgttgagcccatgaccgtgaggcatagacagatagtgatatcatatatagaatgatagtgatcttcatagaggcttaccgttttaaggaaggtggagttttctcgaaatcctcggcggtgttattggaatctttccagcggaagcgtttcccctcttgctcatatttccgacgcattgccaggccggaaccgccggacgtggctatacccggactcacatccatagaagatgggatacgtgtgtaagctaccgtagaggttgaagagacgaaattcgcgatatccagcacccaatcagcgggtatatggaggtattttagcgtattgaaactctctggttctttttggatgtgatccggattggcgatccattctcttaagtccgttttgggacggaacaagaggatcgtcgggccgttcatggaaaacagataggagaaaccagtgccacgccataccaagtttagaggttttacaccggcggagatttggcttccggtcaagataggatcccaaaaagcccattccacgctggataaatcgagcgaggccggaactcccacttcgctattggtatggtttatggcgttaatcgttattgtttgtcgctcccccggttgaatgggatattcggttcccgttcccggaaactcccagcacatcatgaataaaggtatttctttcatatcggtatggagcatccatccggaaggctttgtcacgcttacgggtcctgcttgtgcgatacataggccatctaggaaaatcaagtcatcggagttattgaccaacgtgaggtattgatctttgttatagacatttttcccgtcaggccagagacaaccgctgaaataaatctcgctaatcagtagacggcctcgttcggacacttccaaaggtatttccacggatcgttcttctccattggcctcgaactggatattggagaggctaccactcaatatataatccctgttgccagtcgtggtttcctgatttgcggagattgcgcatatgccagcggttagttcaaatagagctagtccatttgtgtcggtggtcgtggtgtagacacagcctatactttgattgattagtgtgaccgggatattcgccaaggagatatctacgtatccggaaggtttcttcaattggatatggatactccccgttttgaaatactcattctcgcatcctgccagaaaacacagacagagcaggtgggtgaggagagaaaaatgtttgtctatcatgaatatgaggcattgtgcttaataattgtagacaaatatatgtgatttttttatatttccatttaggagctaaaaacattaacatgtgttcttcttatttcggtagcttcagcacgaaccggatcaaggccacgaacaccttcccataccggtccagcttgatttgccccacgccccggatgtcgctgaactggtccaaggtgaccggtttcttctccaccatgtcttccaaagaatcgtcggagaagatgatataagccggcgtatgctctcgctcggcgatttgcttgcgaagttggcggagggagtccagcaaggtctcgtccgtagaggcggaccggatcggccggatcggctgggccttgaaggaggatttccgctcgcctctccggacggggcgtgtcagctcatccggttcccgatagatgacgagctgggccttttgctccccgtacaggacacgcctgcctagcggggtcatccgcaagacacgctcggcggcgtagtcgatctccatgtacccgagttggatcatctggtaaatgtactccttccattctttataagagagatcccgtccggctccgtacgtctttagcttatcgtatcctctctccagcagctccgcgcgggcggaggcacggagtatgtcgatcagcatctgcatgcccacgtgctcgccggtccggataacggcgctcagcgccttttgtatcaagacactgccgtcgaaacgttgcggagggttcttgcacacgtcgcagttgccgcaatcatggtccgcctcctcgccgaagtaactgagcaggacacggcggcggcacatatcggactcgcaataccgtctcatccggtttagcttctccaagttcacctcgctttggccactctcctcggcgaaacggcgaagtacgatcaagtcgctcaaggaatagaacaggagggcatcgcttttcatcccgtcccttccggcacggccgatctcttggtagtagttctcgatactccccggcatgctgtaatgcacgacccagcggacattgctcttgtcgatacccatcccgaaagctaccgtggcgcacaccacgtccacccggtcgttgatgaaatcattttgggcctgttcccgttgggcgggcaggaggccggcgtggtaggcgatcgccttgatattatacatcgccaactcatcggccagctcggtcgtatcgttgcggcgcatgcaataaatgataccgctctgctcccggtgcctccggatgaaatggacgatggcggcgatcttctctttcttgttaagccctcggcgtaccgtgagggagatgttcgggcggtcgaacgatgatatgaacgtttggggcgtacgaagccgtaactgctctaggatatccttccgggtgattttatcggcggtagcggtcagggccacgaccgggactttcgggaaacgttccttcaatatcgccagttgcgtgtattccggacggaagtcatgtccccaatgcgatacgcaatgtgcctcgtcgatagcgatgagcgagatgtccagccggggcaggaaccagtccgcctccatcttgatccgttccggggagatatacaataatttgatcttgccctgcacgcaaagttgcttcacctgttgttgctcctcttccggcatcatactgttcaacgccgccgcagggatgccgttggcgatcaacccctctacttgatccttcatcaaggcgatcaagggggacaccaccaaagccgtacccggcagatagatagccggtagctgaaaacagatcgacttgcctccacccgtgggcatcagcaccaacgagtcctctttctgtaagatacgctgtatgatgtccgcctgcaagggacggaaggaggtatatccgaagaactttttcagtagtagtaataattctttcatatcgctttacgggcataaaaagcgcaaagatagtttatatcataaagttttactacctttgcccacattatttacataacgagccgtgatggctcaccctattttagaatgacatttgaagatttagatttgatagaaccgatacgtaaggctcttgtgcaagaaggttatacgactccaacacctatacaatcagaagcgattcccatcgtttcgcaaggttatgatttattgggttgcgcccagacaggaaccggtaagacggcggccttctccatcccgattatccagcggttatatctccagaagaagaaaggttacaaacggggtatcaaggcattgatccttacgcctacccgtgagcttgccatccagatcggagagagctttgccgcttacggccgtttcgctggattacgccatacggtgatattcgggggagtagggcagaagccccagacggaagccttggaaagaggcatcgatatattaatcgctacgccgggacgtctgctggacttgatcggacaaggattcatccacttggataccttggagtatttcgtcttagacgaggcggaccgtatgttggacatgggctttatccatgacatcaagcgtattttaccgctattgcccaagaaacgccagtccttgttcttctccgctaccatgccccctgagatcgagcgcttggcaggtacgatcttgagcgagccgcaaaaggtggaagtaaccccggcctcatcgaccgtggacgcgatcgaccaatccgtttatttcgtcgagaaggccgagaagatcaacttgctgaaaagcttgttggagaacccggaactggaatccgtattgatctttacccgtacgaaacacggggcggacaaggtggcccgtgtcttgtcgaaagcggagataggggcggaggcgatccatggcaacaagagccagactgcccgccagcgtgccttgacgaatttcaaggatcatacgacccgtgtgctgatcgctacggatatcgccgcccgtggaatcgacgtggatcatctgacacacgtcattaactatgagcttcctaacgtacccgagacttatgtacatcggatcgggcgtacgggtcgtgcgggccgtgaaggtgtggcgttctctttctgcgacgccgaggaggtacctttgttgaaagatatccagaaactgatcggcaaggaagtccccatagccggtggccatatgtatgagaccaaggaggtgaaagtcgccgtagccgagaagaaagaagcgatcaagcaagagtcgaaacgccgtaatatgttcggaagcaaacgtgacggtagttactggcgtaacaagaagcgtgccgccaattcttctaagtaatctaagttgttgtattgtaacgacgtatagtgccagtcatttccatagcattggcacagtcgtgccatgctggtggcatagccgtgccacaacgatggcaagggcgtgccataaggatggcacagctatgccacccatatgccacccggttcgtcacctaagtatccaaacagtccgctttagcgagctgtttggcgctattaccctatactttcttttaaaatgaggtaatctctggaatatttcattatttttgtgattcaattgtgagtgaaacttaagggttgacgtttgtgctgattgtaaaggaggacataatatctcggatcaataatggcgatgccaaagcatttgaacaattatatacgaccttctacgtgtacttgtgcgccgtagcgactaaatatgtctataattcggaggcggcacgtgagatcgttaatgatgtttttatgaatgtatggaatcaccattcggcgttaatacatccggtaaacgcttatttaattcgctcggtacgtaattattgcctgaattatttaagagataaacgtcagcaagaagtccctttatcagatgtacaagaaaacttattgtcgatacaagagttgcagatagacgccgatccccatccgttggcttatctggagaataaggaattcgaggagaaaatctatcgtgccgtggattccttgcccgctaaatgccgggatatcttcgtgcaatatctttaccataacaagacctatgaggaaatagcgataacaaatcatatcagttccagtacggtacgagtacagatcaagatcggtttggcgaagttgcgtgaacttttaggcgatctttaccctcttttcttacttatatttaattttttcgaaaaataattggaatctccttaaacggaatctctaaaacaggtgtatataataaaaaccgggttgaaaaccggctcctttgttaatatcatggaaatagagaataaacacatagaagatttaatttatagctacctcatgggagatatatccgaggaggggcgaaatgaattactacaatggttggaaacggatgacgctcataaacagtgcctttccgagatggcagattgttgggcgacggcgcatgtacctttgtttgcctctgatatgaaagccgatttccaaaaacatttcgggacacttatcgatcccgctattccttctgaaaagaatcattggctaaattttcggtttttaggaaaagttgccgcctcggtcttgatcgtggtatcggtggggactgcctcttattatataggtacgagacataatcagccgaaatctgccgccttggcttattttgagacgacaactcctatgggagcccaaacgaaagtcgttttgccggatcaatccgtggtttgggtcaacgcaggttccacgttgagatatggcagtgatttcaatacgaacggacgtagcgtacaattggatggtgaggcttacttcgagattacccgggattcccttaagccttttatcgtaaaatcaaagagattggatatcaaggttctaggaactagctttaacgtaaaggcttacggaatggatgaaacgaccgatgtcactctggtgtcgggaaaagtaaacgtgagcttgcgggatgaggttgcccatgcgggcgatgtgaccttgactccaaaccggaaactaagctttaataagcagaccaataaggtaagagtcagtgaggtggatgccaaggatgctctctcttggatggacggtagcctgaaattctccgaacaacctttcatgagtatcgccaaggatttggaacgtaagttcaacgtgcgtatccgcgttgagagcgatcctttgagaaaggaaatcttctccggtagctttacgaaagattattcgttggataaaatccttcgtgaggtggacgtggatcacaaatatgtgtggactcgttcgggagatgagattattataaaagataaataaaaatacaaaccttaatcctaaggtgtaagtgtggaaaatagtataaacgagaaaattatttattaaatctaactttaatggaaatgaactatttcaagaagaccggtaagatgatggtagccgcatgtatgcttgcgggactgccgtttattcccggtacggtttcagcgtccgaacttcagacacaaatgatgtctgttcaaatggaaagtacgacattaaaagaacttttcgatttgatcgaggaaaaattcaattacacgttccttatccgtaacaatgacatcaatctgaatgagcgtatctcaatcgacatgtcgaaccgctcggtcgaggagattttgacgacggcgctgaaaaatcagcatgctgattttgttgtaaacaacaataggattgttgtttacaagtcatcttctaatccaaatgaattgagaaacgcggagagaatggtggcgcagcagacgattacgatttcaggtaccattgttgacgcggtgacgggtgagccggtaatcggtgcgaatgtgctcgtgaaaggcactacgaacggtaccagtaccgatttcgatggaaagtttagtttggaagctccggccggagctactttggtcgtttcttacatcggttatgtgaaccatgaggttaaagcgactagtgctccgatgactatccgtatcaaggaagacactcagaaccttgaggaggtggttgttgttggttacggcgtgcaaaaaaaggaaagcttgacgggtgccatgcaggtggtgagcaacgagaaattgttggatgccactagccctacggtcgagaacttattgtctggtaaggctccgggcgtgcaggttacttcgggtggtggtcagccgggcgctgccggtaaggtggtgatccgtggtaagtctacggtaaacggtagcacggaccctctttggatcgtggatggcgtaatcgtcggtacggatgcgggtagcttgaacccggctgatatcgaatccatgtctatcttgaaggatgccgcttcaaccgctatctatggttctcaaggagcgaacggtgttatcgtggtgactacgaagaaaggtaagatcggaaaagctacgatcaacgcttccgtaaagatgggtgtgaaccagttgcaccgtggaaacatgaatatgatgaacggcgaggaattatatgattattataaatctttcgctaatcaagacgcccttccgagttattttacggaggatttgcgcaaccgtaacttcgactggtggaaagagggtacgcatctgggcttcgctcaagactataacgtatctgtttccggtggctcagagaagatcaagacgtatacatccgttggttactataatgaggatggtgccgtgaaaggatatgactacaagcgttataacttgcgtttcaatgtggattaccaagcgacggattggttgactatcaaacctaaagtatgggctacccgtagcgacgtgatggaccagcagcaagatctaggcgctatcatgtacgttaatttcccttgggactccccgtatgacgagaatggcgacttgatccagcaatacaggccgaccgattgggtgaatagcgatgctacaaattacttgtatgacctgcaatggaattatgagaagaaaacttcctatgagtttatgggaaactttgacttcgatatcaagtttaccgattggttgacttttgcgtccgtgaatagctataaatataataacattcttttcaaaggctataacgatcctcgctctaaggcaggagaggccgacaatggattgttgcaagataagaccacaacttcttatcgggtatatagcaaccaattgcttcgttttaataaggtgttcgataaacattccatcaatgcgatattggcttatgagtggaactcttatacccgggaaatcaaggatcagacagcggctagtttcgctccgggtttctccgtggcagatgtagcgacaactcctaagacaataaaaggatcgcaagaggaatgggctgtacaatcctatttgttcaatgccaattatgcgtatgacaatcgttatttattgtctttctctttccgccgagatggtgcctcaaactttggtgaggatgctaaatatggtaatttcttctctgttagtggtggttggaatatccatcaggaggaatttttcaaggcaaaggattgggtacagcaattgaagttgcgcgctagctatggttctgtaggtaatcgtcctactgagctgtattcgcagtatactttgtatgctatgtctacgggatacaacggtgatccgggtgcggtaattgctcaaaaagaaaataagaacttgacatgggagaaaacctatacggcgggtgtaggtatcgacgctatcttgttcgatcgtctgactattaatttggattattacaataagaaaacaaccgatttgctttataaagtgcctctgcccggtgtgacaggtatcacgggtatctatcgtaacgttggttctgttaagaataatggtttcgaggtttcattaggtgtggacatcttgaaaggtggtgattggaattggagcgttgccgctaacttgggcttgaaccgtaataagatcacagaattgtatggtggtaagagcgagattattactgccaacgcaggaacaagctattacatctatatggataagatcttgactccgggtcaggatgtggatacttggtatggaactgaatgggctggcgtagatccgcaaacaggagctccgttgtggtatacaacaaatgagaaaggagaacgcataacaacttctgattatagcgaggcttccaagcaccagactatattaggaaaattaagccctgacttctacggtggtttctctacaaatctatcttggaagaatatcgatttatccgcagtcttcggttattcggtaggaggtgagatttacaattatgaccgttctatgtatgatagtgatggtgcttatgtaaactataatcaaatgaatttaagggatgattggaatcgctgggaaaaaccgggcgatatcgctacccatccaaaagctgaatatggtaataagagccaatccagcaagggatcttcccgttacttggaggatgcgagctatttacgtttgcgtagcttgacattaggctatacgttaccttggaagatccaatatgtagacaatgtccgtctttctttctcgggtgagaacttgtttgttctttcggggttctctggagtggatccggaacttcccgctgaggtaggaagccaatacaaggctggttcggttggtgtggccatttctccgtacccacaagcccgtaaatttatgtttggtttaaatgttacattttaattaaaggaataagaatgaaaaaaatagctatagtggctcttgcggcagcggccacatttataacaagctgtgatatcgaacgtatgccttatgataagtatacggaggacaagatcatggaagataaggatgctgcggttgatgtcttattaaacggttgctacgctaaattgaaaactgcatctgagcatttacactattgtggagagttccccggggataacgtttgcaaggataagccgaccacaaatccattcggtacttactttacttatcagcataccgttaataatggtgggctttctacggtttggaacagtgcttataatatcatctcgcagacaagttctttaatgaagatgatcaatgagaatgaatctccagagttgaaccaaaagttgggtgaggcctattatatgcgtggcatgatgtatttttatctgtgtcgtgtgtttggccgtccttattatcaagaaccggagaagaatctgggtgtacctattgtgaatggtatgcctgaggatatggataacctggatcttccggatcgttcttccgtgaaagatacgtatgagcaagttctgtctgacttgaaaaaggcagaagagttgatgtctgattttaagtcgcccgcctatgcctcaaagtatgcggctcaagccttgttggccaaggtttatatgtatatgagtggtacttttgagaatccgaataaggaatacgctcaattatcttataattatgcgaatgaggtaatcgagagtaatcaattctccttattgagtcgttcgacgtttatgacatataatgagcttgctccggatgcggcttctcaaacggagactatttttgccgtgaaattcattgcttcggattgggatgattggggtagcccgttaggtagtatgtatgcggagattgatggtcaaggctggggtgaggtatacgctagcgctaaatacatggatttgctgcatgagacaggtaaaaatacggatgcccgcgaggcttttatccatccacaatataagaagaatgatgcgggagatcaaattccggctttccgtttcgtcgctaacttgtatacggacggaaagatttccggttatgtatatcgtcagggtgagacaaaggaagtaggtggtaagttaatcgctaccgtggatgatgaagagtacacattaactcccgtagatgtggataataaacgttattctattagttataagggaaaaacttatgtcggtgattatgattacctgatgttagaaagccaaggtaatccgaaattctatagttataaatgctctaagcaagaaggttatccccacctttattcaccggttatctctcgcttaggtgagttatacctgattcgcgccgaggctagcgctaaattaggaaactatacaaaagcattagccgatttgaataccgttcgtacccgttccttacctaacgccggatataaatctttggatgcgacaaacgctcatgagcttatcatgaaagaacgtcagttggaattagcttatgaggctgaccgtggttttgatgtatatcgtgtaggcgatacgatgaaacgtcattacccgggattccatgacggcgtgcctgaatatcctgctaccagcccgttggctatccagtatattccgcagtctgagattaacgcttatccgggtacattaactcagaatccgtaataagcgatgaataagtattgtataatgagtgtgttggcagggttttccttgccaacaactttaatagctcaatcagctccccggcaacttaacgtggtgatcatcgtggccgatgatctcgggtatggtgatctaagctgttacggggctcatcgcatacagactccgggaatggatcgtatcgcaaatgaaggcatacgctttacgcaaggttattgtacggcggctacttctacccccagccggtattccttgcttaccggattatatccttggacaaatagggatgccaaaatacttcccggcaatgcggctctgattatcaatactcaacaggttaccttgccgaaggtgatgaagcaagcgggctatgtcaccggctcggtcggcaaatggcatctaggattaggtgacggggtggtagactggaacaagctggtttatcccggagcgaaagagatcggttacgactattcttttatccaagctgctactaatgaccgggttccctgtatctttatcgagaatgggagaggtgtaaacctcgatccgaacgatcctctctatgtcagttataaggagaatttccccggggaaccgactgggaaggataatcctgaattactgagaatgctcccgagtgtcgggcatgccggcgctatcgtaaacggtgtacctcgaattggtttccagaaaggaggcaagaccgcccaatggaaagatgaggatatggcagagttgttccttgagaaggcgaaaggttttatgaaagagaataaggataaacctttcttcctgtactatggcttgcatcaaccgcatgtacctcgtgttccgaacgagagattcgcgggtaagtcggggatgggacctcgtggagatgttatcttggaagcggattggtgcgtgaccgaattcttgaaggaaatggataagttggggctaacggaaaatacgttagttgttttcactagcgataacggaccggttctggatgacggttatcaagatcaagccgtggaattggtaggggatcataagatggccggaccgcttcgtggaggaaagacgagcttgtatgatggtgggacctgtatcccgttcatgcttcgttggcctgcggaagttaagccgggcgctgtgtcggatgccttggtttgccagatggatttgttagcctcgctgtcggcgttgatcggacagacctattctgataaggtagatagccaaaacaccttgcctgtcttcctaggaaaaggtggtaatgggcgaaaggaacttgtcttggaaggttatttcaattatgcgctacgtgatggtgattgggtcatgatcccgccgtatccggatacctatggcgacgcggaggaggctgcctttgccggaaatagtaactgttatcaattatataatgtaaaggaagacatcggtcagcaagttaatttggcggaaaaagaacctaaaagacttcgacagatgatgatgaccttcgagaggctaaaaagggaaaccggaaagataacgaacttttagtcttggactctttatttttcaaaatactcaataacgttttgattgaaaaaatatttttttaattttgtatcctcaaaacacaaactaatttataaaatatatggaaaacactcgtcgttcattccttaagaaagtatctgccgctggtattggtgccgcaggcttggcaatggctggaaacgccggagctacaacaactgccgctgaaccccaaaagaaaaaaacagccggtaaagatgatggtaaattacgtttcggtttcatcggaacgggttctagatgccatgagcatattaataatgtattggcgatccccggtaataagatcgtagcgatttgcgatatccaacagggcccgatcgatagtaccttgaaacatatcgctaaatttaatgtccctgctccgaaagtttacaaagggggtgaacgtgaatttgagaatatgttgaacaacgaggagtttgattgcgtgatcatcgcaagtccttgggaatggcacgtaccgatgtctgtcgccgctatgaaggctggtgttccttatgtaggcgtggaggtttctgcggctaacacgttagaggagtgctgggatttggtaaatgtttcggaagcaaccggaagccatttgaatatcatggagaacgtatgttatcgtcgtgactgtatggctgcgttgaatatggtccgccaaggtttgttcggcgagatcttgcatggtggttgtggttatgagcatgacttgcgtgaggtgaaattcaacgatggaactcattacaactatgtaccgggtagtggtgatcttcgtatgggtccgacggctttcgccgaggctcaatggcgtacgaaccattccgtacatcgtaatggcgatatctatccgactcacggtatcggaccgatagctcattgtatggatatcaatcgtggtaaccgtttcctttctttatccgctatggctactcaatctcgtggattgcataagtttatcgtggataatgggggtgagaatcatccgttggcgaaggtcaacttcaatttgggagatatcgtgacttctatgattaagtgttctaatggacaaacgattatcgtaacccatgataccaattctcctcgcccttattcattaggtttccgtgttcagggaactgagggtttatggatgaatgatggcgatcatgtatatgtacaaggaaagtctaagcctcatcgttgggatgattccgatgaatggttcaagaaatatgatcataaattgtgggcttccttagagtctcaagctgctgaggccggacacggtggtatggactatatcatgatgtacgacttgatcgacgctatccgtaataagaaaccggctccaatggactgctatgacgctgccgcttggagcgctatctccggcttgtcggagatgtcaatcgctcgtggcggtgctttggtagacttcccggatttcacccgtgggcaatggattcaccgtcaaccgcaattcgctttgtaatagattttcataaaatactagggaaggatgtctttgttaaaggcatccttttcttttttatatacatttttcttgtctcttcgagtattatgattatttttgtcactcaagttaatctattctatctaaattttaaattcgtactatgaagacaaacagaagagacttcctgaagactcttggaggaatcgcggcatttacgattgtaccgcgccacgtgttgggtaatggattcatcgctccaagtgatcaattaacaaaaggaattatcggtacaggtggtatgggccgtggacatgtggactatgccgggactcgtcttgtcgctgtgtgtgacgtcgataagaatcatctggagctaggtaaacagttggtaaaggataagattgccgcataccatgattttcgtgatttgattctagatcccaatgtagatatcgttcatatagctacgcctcctcactggcatggtatcatgtctgtcgaggccgctaaagcaggaaaagatatttggtgtgagaagcctatgacccgtacgatcggggagggtaaacgggtaatggaagcgatgaagcaatacggacgtatgttccgcttgaacacttggttccgtttcgctgacccgttctatggactgggcactccagtgaaacctttgaagaaactggttcaaagtggtatgttgggctggccgctaaaggtaacgatcagcaagcataccggtttcgactggaagttctattgggttggtaaagaatatctggaaccacaatcggtgcctagtgagctggattatgatttctggttgggtccggctccttacaaaccttataacccgcatcgtgtgcatcagacattccgtggatactgggattatgacggcggtggtttaggggatatgggacagcattatattgaccctgtacaatattttctaggaaaagataataccagcccggttaaggtagaggtggatgctccgcaacaacatccggacgccgtgggtacttggcgctcgattacgtatacctatgaggatggttgccagatcgtactttggggaggtgattacggggatccgaacacaccttatatttccggaccgaacgggaatgtttataagaatttcgtatgtgatatcccggattgggagaaaaagttatccgattatcccgaacctgagccacaggttaccgactttatcgagtgcgtaaagactcgtcagccttttgccttgaatgagcgtaatggcttccgttccgctacgatcgtgaatatgggtgccgtagcccttcgtttgaatcgtacgcttcactttgatcccgtaaaactggaatttattaatgatgaggccgctaatcgtttgttggatcagccgatgagagcgccttggaacatttaaatacatacacatatgaaaaaagtatatatatcaattgccagcttattgttgtgcggtagtatgttaatggctcaaagcccggctaatcgtacatcgaagacgatcgttgccgatgtactggcacagatgccggcggagcaacaagctgaatataacaaattaattaatgacttaagctccactggcgaggaaggggtcttgatgttgattaacaagattaacgctccgggaaaaggcagtaactcgaacgtggattatgcgttaagcggattgactcactacgtgatggcgaaaggtgaggaaaatgcccgtctagcaacagccaacgcatatttgaaagccttagataaggtgagcgaccgggagacaaaggcttttattatccgacagcttcaattactgggaaaagatgagtgtgtggatacgctggctagctatttgaacgatgagagcctaagcggtcctgctgcccgtgcgttatccgctatccgtaccgataacgctaagaaggttttggtggcttccttgatgcgtcgttccggtactccgaagacgcaaaaggatattatccgtgcgatcgctgacgtgcaaatcgctgatgcggaaaatgtattgaaagtgatgcttggttccagcgatgagaatatgcagaaagaggttctttatgcgttgagccgtgtaggttctaaagcttctctgagtgatttagccgccgctgccgagaaagccggttataaaatggaaaagaccggggcgaatgaggcgtatatcgctttgattaaacgtgtccttgagcaaggcgataccaaagacgcggagaaagcggcgaatgatttattgaagaagtctacgaaagcgggcatgacacagacccgtgaggccgctcttcagattctattggccgctaagccggaagccgctacgaagaatttattatcggctttgaaagatacggataaaggataccgtaatgcggctttgaacttcgcttcgggtttcgctgatcaaaatgtttatatcgaggtcatgaaacacatgttaaaggcgaagccggaagtcaaggtagatatcttgaactggataggccgtgaaagcaaatgcccgtctaaacatgacgtgatcaagaatctggaacttcgttttgatctaccagcaagacaagttcttttggatcaattgaaagataaggatttctatgtgcaacaggccgctgtttgggccttggttaaaatcggtgataagagtgtcattcctgtgctggctgatttgttgaagagcaatgacaagcaagtgattttattgggtcaagatgctttgatggcatttaacggcgatattgatcaagcagtcgctaaagtgatcccgtccgcttccgatgccggaaaaatcgctggtttggagctgttggcgatacgtatggccgatgcgaatctaaatacggtactggatcagattaaatccggctcctcagaggtgaagaaagccgcttataccgcattgaaagatgtagtatccgagaaagatttcactttattgtgcggaatgttggagactgcggaggcttcagctgtcgctccgcttcaagatgcgatcattgccgccatctctaaacaaccggcggcaactcaagtatctaacgtgaatcgtcgtatgatacaagcgggggacagcaagagatatctttattataaggtcttatcagcgactggcgagaaagaggctttggctacgatcgtggaaggattgaataaaggaaatggagcggccaaggatgcggctcttgacgctttgttggcttggaagggtattgaggctgccgacgaactatttaaggtttgccaatcagccgcttccgatcaagtattcgacagggcgttaaagcgttatgtgcagttggtatctaatccggcatttacgagagagaatcgtttgttgagcttgcggaaagtcatggagattgcccggacgagtgagcaaaaggctcttattttacgtcagatccaacgggcggataccttcttggcattgatgtatgcgtcggaattcttggattcaagcgatgcggctgttcgttctgcggctgtttatgcggtttggaatatcgctcgtaaccatccggaatataagggtgacaatgtgaaggctatcttgaaacgtgttttgaccatgtttgacggggaagacgctcgttatgatatcgatgccttgaagcaacatttggatgcgatgccggacgaggtcggatttgtctctatctttaatggtaaggatttaacgggttggaaaggtttggtcgagaatccgatcgcccgcgcgaaaatgaaaccggctcaattggcgaaagcgcaggagaaggcagatgagaatatgcgtcgtgactggaaagtagagaacggcctgttagtatttgacggtactgggtacgataacctatgtacggaaaagcaatatggtgatttcgagatgtatgtggattggatgttggatccgaaaggccctgaggctgatgccggtatttatctgcgtggtactcctcaagtccagatctgggatacttctcgggtaaatgttggtgcgcaagtaggttccggtggcttgtacaacaatcaggtaaacgagagcaagccttcgaaagtggccgacaataaattgggtgaatggaattccttctatattaagatggttggtgaccgtgtgacggttgtcttgaacggagaaaaagtggtagataacgtgattctggaaaactattgggatcgcaagcttccgattttcccggtagagcaaatcgagatgcaagctcatggcagcaaggtctattaccgtaatatctacgtaaaggaattggaaaaacaagaaccgttcaaattatcgccggaagaggaaaaagagggcttcaaggttttgtttgacggaacgaatatgcatgagtggactggaaacacggttgattatatcttggaagatggctgtatctctatggtcccaagcagtagtttcggtggtaatctgtacaccaagaaggaatacggaaactttatctatcgttttgacttccagttaaccccgggagctaataacggtgtcggtattcgtacgccgatggaaggagatgcagcatatgtaggtatggaagtgcaggtcttggattgtgaacatcctatttaccaaggaaacatcactccgctgcaacatcacggttccgtatacggtatcattcccgcccgtgaggatcatccgaaagcgttcaagccggttggagaatggaatacggaagagatcatggcggatggcgatcatatccgtgtgacggtgaatggagtagtaatcttggatggaaatattcgggatgccgtgaagaatggtacgcctgatggaaaggagcatccgggtttgtttaacaaaaaaggtcatataggtttcttagggcatggttcccctgtcaaattccgcaatattcgtatcaaggaattgaaataatttatattaggctttgaatatagaaagagattgtcttgagttattcgagacaatctcttttttattatagaggatttatactatttaaattatatctttgtgaaatcatagtgtaattttatcggaagggatatttttatggaggatatacagactcaattggatcaatgtaaattgttattggatagggcggaagttggcttgtgggaagccgattttgttcaaagaagttatatctgttccgattatttaatgagtatatttgggaagaaggggaataatctctctttttttgaattttactatataatccgggaagactttagggatctgattactacggattttttatcgatccaatctgtcgatacgtatgagcaaatatttccgataataacaccgactggggaaaaatgggtacgctccagattatgtgagcgtaagttgaataacggagtgtgcgtaaaagcgttgggcatattacagattttacctaatttcaaactgaaagaggaaaagattagtaagatgatcgatcataatgaaatgatcttccgaaagctgtatgtaaatttacctgtgggagtcgagctttatgacagggacggttacttgattgatctgaacgcaaaggatatggagatattcggtatccggtcaaagaaggacgttttaggagtcaatatttttagcaacccgattctgcctaaagatgtgatcaagaaactcaaggagaataaatccgtgaatttccggctgaattattcgtttaagaaggtcgatgattattataacacctcgaaagtaggcgagttggatatcgttaccaaggccagtattttatatgaccaaagaggtgaaccttccagctatttacttattaatttggataatacggaaaagatgatcgcctataaccgtatttctgagtttgagaatgtatttaccttggtcagcgtatacgctaaagtcggttatgccctttatgacttatatacctttgagggctatgccattaagcaatggtatgagaatatgggagagaaggatggaacccccttgtcccaaattattgggatttattcttatattcatccgaacgacgctggatatataaactcattctttgaggaggtgaaacagggtaaagcgcatcatttccgtagggaagtgcgtgtgaagtctggtgacggatggaaatggatttgcgccaatatcacccgtaaccctcaaagcgtagacccgaataaaccggagatgatctgtattaattatgatatcacggagttaaaggactctcaattgaaaagggaaagggcggaagaactggatcgtttgaagtctgccttcctagcgaatatgagtcatgagattcgtacgccattaaatgccattgtcggtttttctcaattattggcggaaacggatgatcccgaggagaggcatgagtttgtggaaatcatcgatagcaataatcggatgttgcttcaattgatcagtgatattctagatttggcaaaaattgaatctggtacgatggatttcaagttcgccgatatgagcataaaagaggtgatcaatgagatcgtgacctctttccgtattaagatgcccgataacgtagctctgattgctcccaaagattcaccggaatgccaaatctatagcgatcgtatgcggctgacgcaggtaatttccaatttccttaacaatgcgatcaagtatacgagcgaaggttgtatcatcttagcttacgagatcataggtgatgagataaaattctccgtgactgatacgggggatggcatgagccaagagatacaagcccatatctttgatcgtttctataaaggaaatacgtttaaacaaggtacgggcttggggctatctatttgcgagaccatcgtaaatagactaggtggtcggatcggtgtaaattccgagttgggcaaaggcagtacgttttggtttacacatccctattccttctcgccgaacgctaaatctcctgcatcgcctaatccgggaacgatataagaatgatcgtcgaggtcattatctaatgcggcgatccagattgtagtcttgtcatccggcattttcttctgcaagtattccaaggcttgtttgcttgagatgatggaggctacgtgtacatggccgggtactcctttggtcaacagggcctcatacgccaattccatagaacttccggtggccaacatcgggtcggatatgatcaaggttttacctgttaagcgaggagaggcgatatattcgatatgaatatcaaaattcaaacggtctttatatttgcggtaagcggatacgaaagcgttctccgcattatccagataccgaaggaaaccttggtggaatggaagcccggcacgcaagatcgtactaatcacgatttgatcgtccggcgtattcatcggggctatacctagcggggactggatgtctttcgtactgtaatgaaattccttactgatctcgtaagccatgatttctccgatacgctcgacattgcgacggaagcgaaggctgtctttttgtatatctacatctctaagttcggctacgaacttgtttaatatggaattggtgtctccaagattaacgattctcatgagtcttttttgagcccaaaagtaatcatttccggacactaaaaatcataagtatgaaatttttcattcatacttataaatgaaagatttcatacttatgattttttatccccttaccggggatatttttactacgttttcggtgactttattatttcaggtgggcattcatcgcctcaaggaggaatttacccggtttgaattttacggtcgtacgagcggggatcattaccggagtacctgttttaggatttctggcaagacgctgtgtttgcggtcttgggatcagtgttccaaatccgacaagtacgatttcctcattttcagacatacgctcagttacgatctcgatgtaagcatccaatactttctttgcttcttgcttttgtaacccggtcttgtctgctaaagcctctataagttctgctttgttcataaatgcaaattttttaaattgttaaacactacaaatgtacactttgaagctggttttatagttacgttttgcaaagatacatttgcatttgagtttcttattaaacaaggcctacagatgtttgttacatttttaagaacaaaaaatgttaataatgtgtctgtttgcgaatttcgaaacatttattgaatcttgatatacccgattcgtgtgtacttgatagtacgggattctatatgttttaagactttagcggaagtcaaagtcaatttttcccctacttggaaagcatgagcgcccggtggcaacgtttgcgtggtaagactacgatctttcgcttttatcctcaataagaagtaatttccggcgatgtccacggccgtgagcaattgatctacatagaaatattcggtaccacggataatctgtgtcttgtaagaatcgtcttcaatgcggacttttgtgattgttaactttaaatcgctcaatttttctcccggtgttcctacaaagcggcttacaggcattttatattttttacgggtctgtaggtcgagatagattttactgtaggtcaccgctaactctttaaaacgcatctcgctttttacgtgaggttcatatttatcggctatccaaacgacgtatcggggatcgatcgtatagatgtcatgcaaatggtatcctctgtatttaccgaaagaaataatatcgtctccattatcgggagagtctttgatatctgtcgttataaataaaggtagaaaggagttgcttaccatcttaatcgccttattcaccgagctgatggcattcaagtcgagattcgccaaatagaccgtcggatgataagtggccgaaggcgtaaagaaccaaagcgtataatataaggtctttgaggtaggcaaaagaatgtagtaccgccctttgtctgacgtttttcctcgattgaacgtgtttaacttgtcgaggatcatcttctgtatttcaccggatatgccggacgtgttctcatccatacgatcaactctatatacaaatctactgaaaaaatccggaactacataatttgcggatgagttatttatgactacttttgccctaaaaataaaatagacgatgagaatagagcagaattattcgttggagaaacacaatacgttccatctcccagtaaagacacgttggttcatggagtatgagacggaggaggagttgcaacgaatcttacatgatgaatactttcaggaatgtttatccttgcatataggaggcgggagcaatctattgttcatcaacgattataatggcattatcatccattcccgaatcaaggggatttctatctcggcggaaacggacgagtatgtatcgcttcgtgtcggggctgcggagatctgggatgatgtcgtggcatacgccgtatcgaaaggttggggaggtatagagaatctttctttaatacccggtgaggcgggcgctgccgctatccagaacatcggggcttatggcatggagatcaaggatgtgatcgagagcgtggaggcttataaccagttgacattcgagaaacggacttttacgaattcggattgtgaatatggatatcgtaatagttatttcaagaatgaacatcatgacccccacatcataacttatatcacgcttcgactatccaagaaccctggtttttcagttaattatgggaacttaaaggaggagttgacgaaatatccggaagttactttggaaacgatccgtgaggctgtcataacaattcgcaggcagaagcttcccgatcctgaagtattaggcaacgcaggcagtttctttatgaacccgataattacggcagagcattttgagaaattgaaaaagcaattcccggaaatcccgtcttatcccgcttcggaaggaaagatcaaggttccggccggttggttgatcgagcaatgtgggtttaagggtaaaaaccatgggtcggtaggtgtttacgagaaacaagcgttggtattagtgaatttaggagatgcccggggggatgagatcgcgttggtcgcggagagcattcgtaccgccgtaaaagatcgtttcggtatagagcttatgcctgaggttaaatatgtcggataatgaaaatcgtttttttaggaacaggaacgtctacgggcaatcctgagataggttgccaatgtgaggtatgtactagtaaagacccccgtgattggcgtctacgggcctcgatcttggtagagacggaagggaaacggatattgatcgattgtggtccggacttccgttggcaaatgataaccaataagatttaccattttgacgccgttttagtaacccatgagcactacgatcatgtaggtggcttagatgatctacgtccttttggtcggtataaagatgtggatatttatgcggaagacaatgtcgtggaggcgataaaaactcgcattccttatgtgttccgggagcataaatatccgggagtgcctaatttggtattgcatacgatcgggacgaaaccgtttgaggccgccggtgtcatgatcactcccattcgtgtaatgcacgctaagctgccgatcttaggtttccgtatcggcaatatggcttacttgaccgaccttaaatatcttccggaagaggagtacgctaagttggaaaaccttgatgtattggttattgatgctcttcggaaaggagagcatcaatcgcatgagagtctggaggaagccttagcgaatatatcccgtatccagcccaaggaggcctatttaatccatatgagtcatcgcatagggttgcatgcggtcgttgaaaaagagttgcctccgcatgtacattactcatatgatggattaacggtgactttttaagccatatattaaaaagattctttatctttgccagctgaaaatctagagaatagctgctttttttaagttagtcgcttatagcaggggtggtatataataaaaaacaataatagactgtatgaatttatcgtttaagaacgtactatgcgtatgttgcttattgctgtcgggatctgtgtatgcgcaggttccgcaagacttgattgacaaggcgaaagccgctggaatgtcggatacgcagatacagcaggaattagccaagcgtatgaaacaagaagggggatctgtcggatctcaagctaccgctaccgatgcgaaggttagcgaccgggtaatgccggtaatcgatgaaggacaatccttagaagcccaacgtagaaataatcttcctgcttcagccatggagaataccgtattcgggcatgaaatcttctcaaacaagaacttatcttttgccccagatttaaacatccctacacctaaggattatgtgctttccgctggtgatgagttattgattaatgtatggggagattccgagctaaacttgaaattaaagatctctccggacggtacgatccttgtaccaaatttaggtccggtgtcggtcagtggattgacgatcgctggcgctgagactcgtctgcgtcaggagttgagccagattatgtctacgctgtctggttcgggagaggggaatacctttgtttccgtcagtttgagccagattcgtagcatgaaggtgaatattgtcggcgaggtagtcgctcccggtacgtatacattaccttcattcgccacattatttaatgcgttgtatgccgccggtggtgtgaataagattggttctttgcgtagcatcaaggtatatcgtaatagcaaggaaatcgctaatctcgacgtatatgattatttattgaacggaaagtacacaacgaatgtccgtttggaagagaacgatatgattatggtaggcccgtacgaccagttagcggtggttcgaggtaaggtgaaacgtaatcgtattttcgagttgcgcaagggcgagaccttgaagcaattgctggatatggctggcggatttaccggcgacgcttatacgaaggacgtacaagtgaagcgtaaatcagatagtcgttaccagatctctacggtttcggaggataagttcgcttctttcgtgatgcaggatggcgattctttgcaggtagattccgttattcctttttatgagaatcgtttggtcgtgacgggagctgtatggcgtccgggagaatatgagttaagtccgtcggttcgtacggtaaagcaattggtaaaacaggccgcaggtcttaaaggagacgagttcgccggccgtgccttgattacccgtttgaatccggatttcacgactacgatgatcgccgtggatattcgtggtatcttgaacggtaccgctccagatgtggagttgcaagcggaagaccaattaagcattccttccctattcgatttgcgcgaaccttatacgatcaaggttggcggagccgtgaattatccggatacggtgcttccgtatcgtcataatttgacaatagaagacgctatcatgatggcaggtggtttaagagagtccgcttcttctattaatgtagaggtagcccgtcgtgtgaaggatcctagttccaatcagaatgtcaaccggatcgccgatgtatataacttctcgttgagtgaggacttcaagttgaatgcgggagatacgatcttcacattggagccgttcgatgaggtttatgttcgtttctccccggggtatcatgagcaacaggtcgtgaaggtgaacggcgagatcacttttgccggtagctatgtattggctacgaagaacgctcgcttgagtgatattatcgcgaaagcgggaggagttaccccagagtcttatgtaaaaggtgctagcttgaaacgtcagttgacagaagatgaattgaaacgcatggagacccttctggctttaagtgaggcgaataagcaaagccgggattccatcggtgtagcgttgatgaatgtgaaggactattccgtaggtattgatttagagaaagcgttggcaaatccgggtagtatcgatgacgttgtgcttcgtgacggcgatgagctttatatcccgcagatgcaaagtacggtgaagatgagcggagccgtgacttatccgaacagcgtaacttacacgaaaggtatgtcggttatggattgcttgtctcaagccggtggttataatgatatcgcacgtaagtatccgatcgtaatatatatgaatggtaaggtcgctacgacgaagcgtaccgctatctttttcaagcgttatccgaaagtggagccgggctgtgagatcgtagttccgacgaaaacgcaacgtgagcgccgaagcttggctgagatcatgagtatcagtagctccgctacctctatggctgcgatgattacctctattgttaacatgattaaaaactaatcaggcatggatacgataaacgagataaaaagacaagagttacctgaggagcaggagatcgatttaatcgaactggcgcaaaaactgtggaaagagcgtaagttcttattgaaaggctgtggtattgcggtggtagtaggtttgattgtagctttcagtattcccaaggaatatacaactacggtgaaattggcaccagagacacaggatgcggcaaaaaaatctagtcttggcggtttggctgctatggctgggattaatctgaatgccgctgccggtgcggacgcgatctctccggatttgtatccggatgtggtgcagagtaccccgtttctgttggaattgtttccggtagaggttaccgataaggaaaaggagttaagcactacattgtatgattatatgagtgaacatcaacgtaaggcttggtggggatatattgtctccgctccattcaaggcgttgggtgcggtaatgagtttaatctccggtgacgaggaagagtctgagggcttgaatccttaccatttgacaaaggatcaagaagaggtggtgaaggccttgcaggagcgggtttctgtttccgtggacaagaagaccttggttatcacggcttccgtacagatgcaggacccggttatttccgctcagatgacaaaggtcgttttggaaaacctccagaattatattacgaattatcgtacgcaaaaagtaaagcaagatttggaatttacccagaaggtatttggcgagtcacgtgacgcttattataaagcgcaacgtgcgtacgctgctttcgaggatgccaaccgtaatattatctcttccagctaccgtacggagcaggaacgtttgaagaatgagatgacccttacgtttaatgtttacaatacgttggcgcagaagttggagcaagataaattgcgtgtacaggaagaaactccggtgtataccgtaatcgagccggctaccgtacctttgaaagcatcttctcctaagaaggcacttatcttggtcggttttgtcttcctcgctttattcggatgtatcggatatttattcgtaaaagatatgtttgtggcagctttcaagaaagaagagactggagcttaattcccgcaaaccgtaaaatatgccacggcctcgtcatgactgacttgtgtcgtggtttttatttgcgggaatagccgattgatccgggtggttatcgtatcgcataaattggggtaaaagttctccaaggctttctcatagggttgctcgttgaagcagcaaaggcttccttcattatagaataaatccattgccaaccattgatttttcattctccactccgtcgagtcattcatttgtacccgtaaatgtaaaggggcgcttttgatgaagagattcattgcgccacgcttgccttttttacgaatcagatctgttagttccggaatgacatgtgcggggtatgtctgttgcctttccaccgtctctaccaataatcttcggttgtaggacgctacgaatataccctcgtggtagtaacaacctagaaaatgcttatcaacatcaggataatatctaacaggaacggaggtttcctctcgttgctgggccggaaaagtgaaagagacgtccagttgcttgaaaatacgctctgccgtatgactatccataggggcgtacaagacatccccttgtggataataagcgattaggaaagacgataattccagattttgccgtattaaagaaaggaaaatagcgggggtatgatctgagaacgccttgcgtatattctccatgggtagtatcatcttctcgaatacaggaggacgattgatggcaaaaattgccgtggggcttggaacgaccaaactatagggatctaccgtagcgacaaattgctcgtcgttcatatgcttgtaaaagtacctcacgcatacgatcgtacccagaaacaagacaaaaaatgccgttatgtctttcttgctgatcctcatgtttgctttaggaagtgtttacaccaaggctttaatccgcattcctcacatttcggtttccgggcgaggcaaacatatcttccatgcaatatcaaccagtgatgggcgatggggatcaattcttccggaatgttcttcaccaactccttttccgtttccaaaggtgtcttgctattattggtcaagccgatccggttggagacacggaatacgtgcgtatccaccgccatggccggcttgtcatatactacggatgcgattacgttcgctgtttttcttcctacgcccggcagtttttgtagctcatcaatatcggagggaaccacgcctttgaaatcctctatcagcattttcgccatacctaccagatgtttagccttattgttcgggtaagatacgcttcgtatgtattcaaagacaacttccggtgtgctagccgccattacctcgggagtcgggaaagcctcgaacagggcaggtgtgatcatattcactcgcttatccgtgcattgtgcggataggattaccgctatcaatagttgataggggtcgtcataatgtagttcagtctcggctaccggtacgttttccttaaaccagtttaatacgcctttatacctttcttcttttcgcattgctttttcggtttctgtttttcgcatcctaaaggtataacttttaataggaatatacaagcggagatgtgccaaaaataagatacacccgaattgtacgaataaataaaaaagtaccgatctccttcttccatctaagagagaaagaaatcggtacttttttatttattattccctaacgatctggtggatatgtatagattcttttcctattgtggtgatttctaaagaagagaaatcctcgaacatggttttatttaatttgatgtagcctacgtttccttgatagacgatgtttttctcgccatcttgggagaggccggtgatggataccagattctcgttacttccggagaggaagaaagatacggcgttgatatcatcacattttatatgaatcatttctcccgggttcaagttcttatacgtatctaggttcatatcgtacatcataagagcctcattgatttgcgggtcttgtttggttgtcgccgtgaatcctagtacgtatagctccatttgctgatccgagttatttcgcatacggatataacgggctttcgggtcgatggtgcggatcgtatctttagcgttttccgtggagacatgagggattaggctccagctctttccgtcggcggaccactcgaatacccgtccgggttggttgcttttcggaagattgaaacagaaggattccgcttctttctggatttcccagccgatacccagatattggttaggttgtaccttgactacctcgaataggggaacgtaaccgaccgtattgtcaccctcggcacaaggctggctctttaattggtcgatattcgtgaatatggaagggatgctaaccttcacctcgtccggggcgataccgtccgtagatagcaggttacgacctgtctggcggtataagtctacgatgaaagggtgtaagactttcgatccgactttcacgcctttaggctgcgccttctggttcagcgtgcggtttatcagtttcatgctatctagcaaagcggatgtttccagatagcgttgccacgtataagaccggtctttctcataccaagcgtgcgccatatgcagagcgcttgttccggcttttcctaagaactcgaattggataagccatggattgatttgctcgatcaagcgtttattgggactttggctatagatcatactcggggaagccgtgatttgagcgaataaggttcccagaagattcgcgctttgctccgggaacgtgtttttcttatatccggcgaggaatgtctggataggagccacatagttagcggactcttcccggcggtattgatgtccgttcggacccggatcgcagttatgctcgcagaaaatgcggaaagccatggaggcctccggcatgatgaagtcgcaagcgtctttccatgcctgtgtaggatcgtaattctcgatattccaagtgtacattccaacgccgaatatagcgaccttggaagcctcggcgtattccataggattggatacgaatccggtcatggtgccggcggcttgcgtatctaggccgtaggcgggtcccatcaacaaatgatcttggcaataatcgcttacggggaagttccaccagatataggcgggacgacggatacggttgtttacccactcgacaccttctttcgtgatatcggctacgacacggtctccggtccacatgatttggatggcggggtcgagttgggtaccgaggatatccagataatcggtcttagcccatgagcggttgtattcggtagggcacatgatcaggggctgcacgtcgcttttcttgcggataaactccttatggatgtaattcaataagccggcttgcttttccgggcgggctccctctccggatatatcatcgaagaagacggcgaaagagcgtacgcccaaatcgtacattttctcgaatttggaaaggatgttcatgctgtccgtctggttccattgaatatcttgtcccgggtggatggcccaaacgaagtttactttgttatgggcggcctctttcgctagttccttgatatgctcggcttcctcggcgggatacggtttgcgccagttgggggagctgtgataaggatcatctttcggaccatagatataggtgttcagcttgatccttccgtaaaagcggatttgctcgatacggtcggcgtggctccaaggctgtccgtagaagccttccacggtaccccggaataatacgtccggatagtccttgatcgagcagagaggcaggatcttcttaccctcgtcatacttgaccaattgcttgagggtttgggcggcgtagaacaaggaattatcgtctacgatcccgatcgtgataccttttttagtgatcgtcagcgtataggcacccgagcgttgcatctccggggctttgtcttttagcttcttgatctctaaggggagggatttgccggatttagcgaaaggtagcgcttctttaagtagtctgactgcgtctgcgtccggattatttatgcctcgtagggcgtatccatggggcggcgcgtatgtctggctggagatagttacctcttggggctcggggaagattcctagggatagcttttggctatgcgttaggttacaaacgcctagaaggagcatggtggcgagtaaatactttagtgtcttcatatacgatatgatttaatgttaacgttcgtaaatgtatgaaataattaaacacggagcacacggaatacacagatttgttccgtgccctccgtttttagatcttatagggagaatagcaatacccggttatccggatttgtccattcatggatcaagctacgcacgtcgctatattcggcgggagtgaactgttgcttgttcaactctatcgtacgtaccacctcgatcgtatttcctcttggtgtgatcgtgcgggttactttaccaaaaggcttgcttatcacttgctcttgcgtggaggtctgcaacttcatgccctcggcgggagtaaccgtgtatgttacctcttccctgattagggaggggagttcgaataagttggaacgcttgctgttcaaggcactcatgccccagctatcgattccggcggagatggctggcaatacgcagatggcgaaaccgtcttttgcttgatcggcggagatggccacggatctactttccttaatctgaataggtgtggtctcaatctcaatggaagttccggagagggagactaccttatctagtccgccacgatttgtcagcggggaggcggataggtattggtctttcccatcgacagtggcttttacggctagtgtctggatggcagccagcccgcaagcgtccgtatcgagatggccgggatagacggcgaggacttccgacgggattccggcggcattcaacatcacgttcaagagctgtgcgatctctagcggcgtaccgtaagcactgcggagaacggtatcgatgtcacggacggtatagccggtcatcgccatggggataggacaggtactgagattgttgagtatatggtctcggatgatgttcaccttctcttgttcgttaccgcttttatcggtgaggaattgggcgaaggttttgctctcgtatccctgcgattcctttaagcgcttatccaaagtggctaaggccgctttacctgaaggataggtagaggctaccaagtggggtgaagcctcacggttctttggttggaaagcctcacgggaggaagcgggaatgttccgtagtgtccagtgtacctcctttataccgtcatggctctcttccacggcttttacgggggagccgtatagaccgcaagccaagggggtcccttccggtacggaaatagagaccttgcattccttcacgggagaggtctcttgtagtcgctcgttgatatccagagccggatagtagcccggttttgtgataatagagtaatccaagtaaatcgtggccccaagttctaggccagtgtgtaccacgaccatttccttgagttggttataggccggagcgtcggcggcgaaacggggcaggacctccacgaaggcgttatcgggtgtctttacgatcgtaccgtctttctgcctcgtataggatgagtgaatcttcagtgtttggaaatcgggattgtagacgataaaactctcgccatacgtgctattcattgcggtatgcgtgaagagcgtcaactccatggaggatcgatattcttggctgccgtcggcatgcaaggtccaagctttcgatactttcccgtactcagcctccgatgcggcgaatgaagtaaccgtcatcgctaacaagcttaggagaagaatcagtttataggttatcttaatcattgtctttctttttttatttcttgataatcaaatagtcaccataactcttataggcgttcacggcggaacggaagcctttccagtcggctgcgtcgtagacacgcttcttcaacgctagcttctggcgcaagacgatgttccggtcgccttcctgtgaaagggaaccttcgaaatcggccgcattgcttcgcagggcgtcattcttcggggcgttcaggagggtatagcctttggggagacggatggtctcatcttgttctaccaaacgggagcaagcgtccttgaatccatacgcacggttttccggtttcgtatcgatacgcaagaaactcttcacttgattgtagaggttattcatgactagcggcttgataagcatctggtctccggcgatgatcgcataatcggggatctcataagagaacgtgatcttgataggggccgcttgatagttcttcgggtccttaccgtaatctacacgaagcagtttggcgttgggggatacggccagcaattgcttctccatcgtgttctgccagtcggattgccatccggtggtgaagatgcggcggatattgctgtcggactgtccctcggcggtgatcgtgaattgtccgcggagcgtgcctttctcgtctaggcggttgtcagcgtggatgcggacgtagtggttttctggggcggagacaggggtcaggcagaggtcggagccttcgggcacacccgggaggtagttctgctgttgctcggcgctactccataattctcggcagaaaggaacccaagtcgggtcgagaggcatatacgtgccgctagccagttttaccaccgccacgcaatggttgaaatggtcggcggggatgctttctacacggcttcccgccatggtcatcgccgggtaagcctcgaatccggccatgcggaggaaggcgatcaacgtaccggcgatatccttgcagacaccgcaacgatcggtataattcatctttaggttgtgaagcgtgaaaccctcgcctttacccatcgagattccggagtaacggatgttatcggctacccagtgggtcaatacggctatcttctccatttccgtcttcttgcctttgatcagctcgtctaccttcctttgggcttccgggatcgcggtaaagcttccgtaatcctcgttaaccttattgaaccatacggatttatcttcccagcggggcgtgctggacatcatgagcttcggggcagcgtcgaataggtctaccatattcggttccttggcgaaaggaaggatatcgtcggaggcgaaggtatatactttccgtccatcctcatatcgcatggaagaggtacattcgccttggtagaactggaattgcaactctttctccatcggcatggatacccggtataccttacgcacggtaggctcggtagcccagaaggggacgatatcgtaaaactgtccccgcataggagggatgaaacgctcgtcgtcgcccgccgtcagcaaggcgtaggtgaaacctttcttggcgatctcgtactccacgacatctcccggttgcaggcggcccacttccagcatgatctgccgggcgccccagtagatggcacgtgcgggggcggcatagtcgcaagccccagtcacgtcgagattgatcacgtcgccattcgcacggtagatcgtggcgtaacgaaactcggcatgcgccgtcagcgggtcgtaatcgtatttgatgatacggttggcgacggctcccttgggagtctgtaccttaaaagccttgcatacggcgaaagcccccgagccggtaggttgtaccgtgacggcggtgctgtccagcaaggtgacgcagtcgtatcctgcgtaggcttgcgatttctccaaggtaggatcttgcgggtatcggcaagaatcctgcccgtacataggcgataaggccaatagggagaccgcggtgattgttagaatccttttcatgtttatagtgtttttgtgatgatatttctcgctagctcccggcaggcggcacgatcgatcttgccgcttccggtttgggggatctcgcttgcctctatgacgtgccttggacggaggtacttgggcaggctggcgagagccactgtcgatacctcacatgatagctgcgcggagtcgctcatgatagctttcatgtgtggtgtcacccgagggggtgataccgtttcacatgaccttggggcgattagtaagactaccgcctctcccaaccgagggtcgggggcggcggtgatggcataggggaggtctaggtagggccgtagccgctcttccacctcctcgatctgtattttgattcctccgctattgatgatattatctttccttccgataatggcgaaactcccgtccggcagcaggcgggcgacatcgttcgtcaccagccgctcgtcgcaaaccaatggggcgtctatcaccaaggtattgtccggcgacaaggataacgtcaccgaggggaagggatggtaatagggcgaggcttccggcccgttcagccggcgcagggcgacgtgagacagcgtctccgtcattccgtaggtggaataaaccgtgtttggcatctgccgtatctcctgttccaaggccgcgtcgatcgccccgccgccgataatcaggatatccgtttgctccagccgtttacgttcctcgggtactcgcaacgtattgtaaacctgcaaggggatcatggcggcaaagcgcaggggcgtatccccccaatccgccaacgggtgtccggagggttcacgcacctccagatccagtccggcgtatagggagcggaccaccatcatctttccggctatatagcgcaggggcatacataacagggccttgtcgcccttcttaagacccagataatcgcaggtaagccgggcgctgttcagcatccggtccttgcgcactctcatccgcttgggcgtaccggtggagccggaggtctggacttccagaaaaggggagggatcgtgccattcagctaagaatgcctgtaaatcttcttgtatcggcataggtcaaaggtcgttggtgaaccagatggtgtctccttttcgttggatcaaccgatgtttatcatccttgaaaatctcgccggttcccagaccttgcggtagcgggttacctaacgtggcgcaccattgggcgatagcgttcagtccgatttgcgattccagagcggaggtgacccaccatttaggttgttcaggggtactccctaagatagcttccgctaagtgaatccattccgtacatccggagatacctccgtggagggaaggctttaatataatgtattggggatggatagtttccaacaaccgccgtttctcgtccggggcgttacagccgatcagttcctcgtcgagagcgatgggaaggggtgactctgccgcaaggtgtgccatttcttccaactgcccggcacggataggctgctcgatggaatgtaagtccatctcggcgagccgcttcagtttatccatcgcctccgggggagtgaaagcgccgttggcatctacccgaagctctatttccttggcggagaaatgcgtgcggatatgtttcaataaagagagttcccggtcgaaatcgatagcgccgatcttcagcttgacgcagcggaagccctccttcatcttttcctctacctgttccagcatgtacttataatcgcccatccagatcagtccgttaatggggatgcccgcttgcccccgcgagaagggcgtgtcgtaatgccgccaaccaccctgttcataatgacgcatggccatttccaatccgaaaaggatggatgggtaatggcgcaaagattcggtgtcaacatatcccttctgttccagatcgaggcaagccttggataacgtgatctcgtaatccactccataatcgcaactgagatccggcaggggggcacattctccgataccaataaccgagggttcgtcttccttgcggattcggacctcccacaatttccgggtcgtgtaaacaccccgtgaggttcctgccggtcgcttgaaagtcaagcaccggggaaccacctctgttttataaaacctctccttcaccattcattctcaattttcaattctcaattctcaattccctttacgggaacttcgggtaatcctcgaagcgtggacggcgtttctccaagaatgccttgccgccttcctgcgcctcgtccgtcatatagtaaagcatggtagcgtctccggccaactcttgtataccggcctgtccgtccaactcggcgttcaagcccgccttgatcatgcgcaaggccaacgggctaagcaacatcatctcctcggcccattgaacgtactcgtcctctaatttatccaaggggactaccttatttaccagacccatatccaaagcctcctgtgcattgtacttgcggcataggaaccagatctcacgggcctttttttgtccgatcacacgggcgaggtaagaagagccgaacccggcgtcgaagctacccacacgagggcctgtctgtccgaagatagcgttctcggaagcgatcgtaaggtcacaaaccacgtgcaatacgtgtccgccgccgatagcgaaaccgttcacggctgcgatgacgggtttcgggagagagcggatctgcttttgtacgtccaatacgttcaagcgaggtacgccgtctttacccacgtagccgccacgtcctttcacgttcatatcgcctcccgcgcaaaacgccgtatctccggctcctgtcagaacgactacgttaatgtccggacgttcccggcagatgtaaaaggcgtcgctcatctccgtggtcgtagtcggggtaaaagcgttgcgataccgttcccggtttatcgtaatgcgggcgatgccgttgtagaaatcaaataagatctcctcgtattccttgatggttgtccattctcttttcgtttccatatattatatgttttgtgcttgggatgaattttttagttgatgataatattccttgagcaatcgtacgtcttccgctttgtccgtgaaaacctccatgaataggggatgttcgctcggttgctccgtttgggtaaaggcgctcatcgcagctgccaactcctcggcgttatgaacggcggagtaggagaatcccctttccgtggcccatccctccgctgaggtctggtgggaggcggtgacgtaacggtgcgtacgctcgttcatcttgaatcccggcaaggcttggaagatctcgccacctccgttgttcaagagcaggatgcgaaggttattgtgcaagtttccgttccacaatgcgttcatatcatagaagaaactaagatcgcctataacgataaagtttagtttttgcgaggccgaggcgtatccgatggccgtagacaaagagccttcgatcccgctcgtacctcggttacaacaaacctcaaccgtctcgggtacggtgtacaattgcgcgtaacgtacggtggagctattccccagatgcaaggcagattcagccggaagcgaacgtatcaaaccaccgatcgccgccatttcggagtaagcgaactccggctccggcagattccgggatttatattcccaagccttcggatattcaatctgcctattctccagcatataagcgattttctccagaaactcgaaagcgtccatctcgatcaccgtggtcaggctaccgaataaatccgctacctccccatccaatgagacatgccaatgctccttaggcgggtgtttccgcaaaaactctttcagccgcttggagacaatatggccgccgtaggtgatcacgagctcgggaaccagcttctctttttcctcctctggggtagcgtacaggatggcgtcgaaattcttgatcggcaatcccggtacgatacggttgccgatgtgctcggagagccaagtgaaatgcttgtatagtaacttgcatattttcttctcgaagagatagatcaagctcatttgtcccgctatcatcattcgcttgctatatttgttcaaacgctcgatcagatcgtcatatttccggtcgtacacgtttaggccttgataacgggtgattacccgtaccttcggcaattcgggtgtcgtgaactgaaataaaggctcggagatcgggacgttgatatgaaccggccctttgccgtgatggttcagttccaacaaagcctcgttgatcaatcgattacaataccattcatcttgatccgtatgtatttccggtagctgtaccgatttcttcaccagcgagccgaacaccccgggttgcggcaaggtctgtccgtccatttgcccgatccatgcggcggggcggtcggcggatatcacgacaagcggaactttctgatagaaagcctccgctaccgccggatgtatattcagcaaggccgtgcccgaggtacagcaaacagccgccggcttacctccgtgcaacgctagccctacggcaaagaatcccgcgcttcgctcatccgtcacggaatggcaattgaagaacgaatggtttgccaatgtgtgcacaatcggagagttccggctccccggacatagcacgatattacttacgccgtgctctatcagcaaggctaccaattgaaggatgttctttttatcgctatacattatatgatataaaattataaattacccactattctccgcatcgtatctaatttatcctctgtctcctgccactcatcctctagctgcgaggccgccaacagaccgcctccggcatacagcgtaaaggtttgggggaggatattcatgcaacggaggtttacgtacagatctgttttgcctttgggatccagccaaccgatgaaaccggagtaatagctacgatcgtacccctcattctcgatgatgaaatgataagcctcctccttgggaagaccgcaaacggctggagtagggtgtaatagttgaaggacatcacccagcttctcgggattcggcaaggagaagaagaaatcgcttttcaaatgggaaacctctccggcccgggctgaataaggccccttctcctcgggagtaatacccaaggtggacagctggcggcgtatataggaggcgactaattgctgttctctccaattcttatggtcccagcttttcggtaatttcccgtctcgtaaggattgggttccggccaaagctaccgtttgccagtcgcctttctcgccggataacaagatttccggtgtcccacccatccaagttccggtttccggggtatggcaaaggtagacataggagcggatatatcgttctactgcggcgaagaatgccttgccgggtgagaaagagggatctttccggatcgttttgctacgggataggactagtttatcttggcttccttttagcaaagggctggtaaacagggagaaatggtaagcgtatcgttccttctcctcggattcggatgggatttcgatttcattcgaagggaattcgtttttctctcgagagaaatcccaatcggattcggaggggatttcaaagcaatccggttggattaaaacgataggtcgttccgctgtcacctgaaacggagcgattacaaaaccgctccgttcatttaagtcttttatgtcgtataataggcaaggagagccggcgctttgcatcctgaaatggagcctatcctcaccgggaatacgccaaatagcgaaactccggccttgcttgatcaacgtgtctattatttcgtaagaatctcttggaatcatttcttctttagtatgctattgattacccgtaccgaggaaaccagtttgtcggtagaggtgaatatgtctacgttccacacatgggatgaacggcctttgtggataatcgtcccgacggcacgtaccgtgtctccctcgtgggcggacgacatatggctgccgctaacttgcatgccgactaccatctcgtccggtttcgccagaatcatggaacctagtccggccacggtctccgccaaagccagcgtagcgcctccgtgcaagataccgaaaggctggcgggtccgttcgtctacaggcatggtcgcttccacacgatcctccgacgcataggtatattgaatgcctagattacccattaaggcatgtttggcccgtgcgtttagttgatctaacggaacctccgtgggtttgatcgtggcaaggatcgctttctcgatcgctaccgccacaccatccatattattagataaggtcgtgaaatcggcgcaagcctttacggagtcgcgtgcgttacccatcgccacgccggtaccggctaattgaagcatggatacgtcggctacgccatcaccaatagcgacaacctcttcggtcgtgatattcagcatctccatcaataccgccaacgtatttcccttattgatgaaatgaggagctacctccaagaaatagtcctcggagcggaaagcttccaataccccgtccagacgtttcttccaatgattttcgagacccactagattgttctcgtcatcgctggtaagaatacacttacagggtgcgaaatccaccgcttccgggaaattctccacaccgatgatgcgcatcttattgagttcggcctcctcttggacatgcttgttttccgggctatcggtcaggatatagtccttgtgatacgtgaagataacaaaaccgttttccttcgccttccggttcaaataaggaatcatggccggatcgattcgtttctcgaacatcaattctccggtctgggcattgatgatctgacctccgttataagataatatgaaaccaccgtaatgattcaattcaagagcctccgccaagggttgaaccccgttggtgggtcggccggatgccaatacaacatgaactcccatctgctgagcctttaacagggcggcatgggtccggggagttatctctttcttgtcgttaagcaacgtcccatctacgtctaagactaataatttgtacttcatggcgtcttattttatggtttagaatacaaatgtacataaaatagttgatagttagaagacatttccatgaaaggaatttacgtatatcggcgcaagctcacgcctatatcggtgtagccttgcggcgatatacgtacaggcttatgccgatataggcattggcctgtgccgatactggtgtaaatgtctctgaaaaaacacgtacgtgttctcgcgaaaacatgtacgtgtttctcggaaaatacgtacgtgtttttttcaaagcaattcttggatgaaacgagccactccatcctcatcgttcgtgtattgggtgatgcggtcggcattggccttgacagggggctgggcgttggccatagcgactcccaatccggcgaaacggatcatggatacatcgttgaaaccgtcgccgatagcgatcacttcctcctgttttatccgggttcgctctagtaagcgggataacgaggcggctttgtcgatgcctttggggacaagctccagatagaatgcctcggaacgatatacgttgatacgtttccctaattcttggcggagcttctcttccaacggtaccaacatctccggttcgcctaccaccaagcatttatcggctggctgatgcaaatcccgcaggaaatcgtcggtagccttgatcttcattttggttaagaaagattcgtattgtacgtatttattttccgggtgttcgcttaagatatatttaccgttgtaggaaaggatagccagtcccgcttctttggagcggttgtataaaacaggtacgatatcgggtggcaaagcctgttcgaaaagtactttgtctgtcatcaagtcgatcaccttaccgccgttgaaggaaaggataaaaccaccatattgctttatgttcagttcctcggctaaaggcacgataccgtaggtgggccggccggaggctaagaccagatgcaatcctttttcctgcgcttgcagaagggtttccctcgtaaacggggtgatctcttttttactgtttgtcagtgtaccgtctaaatccagtaccaataatttatagttcatgctcttgtttcgtgttgatcgtgattattttacctctttgggagatataattatagagttctttataaaatgcgtgccgggtaagggtggaagcgtctcccaagatcatcagtttcatacgggcacgggtgatcgctacgttcatgcgccgtaagtcgttcaagaagcctatctttccatcctcgttggccctcaccaaactgatcaagatgacatcgcgttcttgcccttggaaaccgtctacggtatgtacggtaatcagtctgcgtaaaggcttgaagaaagcgtcctgtttgattaatttacggatgtattgtacctgcgccttataaggggagatcaatccgaagtcgatattctcctccagcactctctccttggatattttctgtatataggagcgtaattgttccacgagcaattccgcctcttgcctgttgacacggctcatggtctcctctctcgtattttccgtgaaatcgcactcggacgtatcgaaccatacgatgggagtgtccagtcgcaagattcctcgcccacttacctcgggagcggattcgagttcgttatgatagaaccattgggaggagaagcgcatgatatcctcgtgcatacgatattggatcttcaggagagagactgtttccggtttcgtgtgggctatcttttgcatcaaggtacgtcctaagccttctcgttccgcttctatacatttaatagtagggggcaattggtgatgatcgcccgctagtatgacccggtccgccttgccgatcgctatccagcaagcggcttccaaggcttgggcggcctcgtcgataaacaaggtcgtgaagtgccggttcatcatgacccggtttgcggagccaaccaaggtgcaagcaacgacacgagcctcgtcgaacagctctgtatcgatcttgacttccagttcggtcgcccggaatttcaaacgggagaggcggtttcggatcgtatcccgttcctcccggcttttctttcgcatattggattgtatatcccgtatcgctttccggatgctccataattcgggataatccggatgcgactcgaaacggcgttcatatgtgaaagagagcatcttgtcattgatacgagtggggttcccgatgcgcaggacgttaatgcctctatctaccagtttctccgagatgcagtctacggcggtattactttgggcgcaaacgatcacttgattctcccggtgaagggtctcgtaaatggcttccaccaaggtggttgttttcccagttccgggagggccgtgtacgatagatacttgtttcgctcccaataccttatttacggcttcttcctgagaacggttcaaccaagggaagcggatcgggaataattcccgctgtcccggtttttcctgtcccagcaatacatcccttagatgagagagttggttgttttttgcccgcatcacgtccgagagagcggaaaacatcgttttatagctggtctcgtcgaagtagagttgcacgccgagatcattgctttttccttgtatatccatcaaggcggaaggagtggggagaactaccaccatccggtcctcttgcacgtagctgatcgtggcggagaaatccagatacttaaatttaccactgatatctgccgtaaagaagcaaaccgggcgcccgtactcaaaattatgctcgatctcccggtcttctgtcctttcgatctcgatcaccaattggtttaaggagttataataactgcgtcccggagtgaccggataccaacagaggccctgcgccactcgttttcgcaaacccgtacgctcggattgctgtcggtatgtttccttctcatattcatattctttctgcaggagatcatattgatgttgcaaatctacaagcggcgatgaaattcccattcctttatcaattcaattaatcggataaatacagcccgggcgttctaggtcccgaagtaggcgacaaaagtactaaaattatcgttccgtacccaagttgcggtaagtaaagaaaaagaataccgctaacgttggtagtgtctataaaattcctaattttgtacgaaaactaatatcataaaaaaatgaatgagaacgatgctttttataacgcattaatagatgtagctgcttgggataaagagaataccttagatcgttttatgaatagtgatagcctcttcaaaaagtttctatataaatttattactacagacggttcgtatgtgaaattacggagctctttagtagagcgggatttggagaatgccaagctatattcgcataccttgaaagggatagccgctaatttaggtctggtaaatctattcgatgtatcgaataatatactatcgctgttaagagaagggaatctggaagaagcgttgcgttatgaagatgcattgggaaaacaatacgatgccttgcgagatatcgttgttgagttttgttcttaatctattgtatattaactatctaattctaaataaagactatcagtatggatactatcataaaaactcaaattatagatttgattcacagggaggtaatccctgctatcggatgtacggaacctattgccgtggctttggcggccgcaaaagcggcggaagtgctggggcgtaagccagagaagatagaggtttatctgagcgccaatatcctgaagaatgccatgggagtaggaatcccggggactggcatggtggggttgcctatcgctatcgccttgggatcgatcatcggtaagtccgcttatgggctagaggtgctgaaagacttgactccggagggattgaaagaaggtaaggaaatggtctgcaagaaatgtatcggtatagacctgaaagagaatgtagataaactttatatcgaaattataagttctgcagggaacgatcgttcaagggtgatcatttgccatgagcatacccatataatatatgtagagaaaaacggggaggtattgactgatttacgtatggcaaacgcttctggcgaggaagtatgtgagaataaggatttacgtctttccttctctatggtctatgagtttgccatggaaatgccattggatgagattcgttttattttagaaacagctgagttgaataagaaagccgcccaagcttccatgaaaggcaattacggacatactgtaagcaagacggtctcgggtgctttcggccgtaagttcatgggagattccgcttatacgcatatgttgatcatgacttccgccgcttgcgacgctcgcatggacggcgctatgatcccggtgatgagtaattcgggaagcggtaatcaaggaatcgccgctacgcttccggttctttctttcgccgaggatatccaatgctcggaagagcaactgatccgtgcgttgatgttaagccatttgatggtgatctatatcaagcaaagtctgggacgcttgtccgccctttgcggttgtgtggttgccgctacgggagcgagttgcgctatcacctatttgatgggaggaaataaggcgcggatttcttatgcgatcaagaatatgatcggtaatattaccggaatgatctgtgacggtgccaagccgagttgcgcgatgaaagtatctagtggcgtatctacggcgatgctttccgctttgatggccatggaggataaggtggtgacttccgtggaaggtatcatcgatgaggatgtggataaatcgatcgcgaacttgaccgctatcggttctaaaggaatggaggcgacggatcgtctggtgctggacatcatgaccggtaaatcttgttaatgggattctatggaggaggcaccaaaggcgaggaaaaaagagattatgcgagtgacacttttagggtcattcgctaattttgttttattggtattcaagttcgtggcgggtatctgggggcatagtagcgctatgatcgccgatgcggtacattcgttatctgatttcgtaacggatataatcgtacttctttttgtcaatatatcttccaagccaaaggacgagagccatgattacgggcatggtaaatacgagactttggcgacttcaattgttggtatcgtcttgctttgtgtaggttttggccttttctgggagggagcgaacaagatttatgacttttatttcaaggggattccgttggaaagtccgggaatgatcgctttagttgccgctcttatctccattgtgatcaaggaattactgtatcatattacggtttgggtaggaaggaagcagaatagtcaagtcgttatcgctaacgcttggcatcatcgctcggatgccttttcctcgatcggtacggctttaggtatcggaggggcgattttgttgggggataattggcgtgtgctggacccgttggcggctgtgattgtcagtttatttatcgtaaaagtagccttacaactagtgatcccggcgattaatgacttattggagaaatctttgccgaaggaggtggaggatgagatcttggcgatcattagtgagattcccgaggtaaagagcccgcataatctacgtacccgccgcatcggtaataattttgctatcgaggcgcatatacgggtggacggacagataaccgtgactcgtgcccatgacttgacgaaagagatcgaacagaatctgcgtgataagttcggtcaggctacgcacatcgctttgcacgtggaaccaattaaataaacgaattgttatttgaccatgatgaagaacttatataggggagaagtgctctatttgatcgcttccccgctggatcatgtggaggcttaccgctattttgaggatgggggactggctgttgttgatggaaagattgtagaggcggggccgtttgaggcgatgcgttcccgttacccggatttcccggtgacagactattccggtaaattgattacacccggctttattgattcccatatccatttctcccagtcggagatacagggaatgtatggcaagcaacttctggattggctggacgaatatacgtttcccgccgaggaagctttctcttccatggaatatgcacaagatatcgctcgctttttcgtgaaggaactggtaaagaacggaactacgacttgtgccgcttatgccacggttcatcctgcttccgtaaccgcattattttccgtggctacggagtataatatgtgtatcttggctggaaaggtgatgatgaaccggaacgctccggattatctgatggataccacgcatcagggtgagttggactgccgtagcttaatcgaggattgggacgggaaaggacggaaccactatgtgatcacgccccgtttcgccataaccagtacgccggatcaattaaagtctgccggtcgtttacatgccgaatatcccagtacctatatacagacacatctttcggagaatctgggagagattgaatctgtcttatcgctctgtcccggtcatgcggattatctggaggtctatgagcgtgccggattgttgaccgatcgttcgatattcgggcattgtgtccatctaaccgatcgggaatataagcggttgggagaaacgggaggcattatcgcccattgcccgacctcgaaccttttccttggaagcggattattcgatatgagggaagcgaaccgttacggcgtacgtactaccttggcgacagatgtcggtgcgggtacatctttctctatgtggcgtacgatgggagaggcctataaggtacaacagttgaacggttatccgatgacagctttggaggctatctataaatgtacgctaggctctgcacgggccttatcgttggacgaccgaatcggaagtttcctccctggccgtgaagcggatttcatagtcgtggattatgccgctacctctgtccagaaattgcgtatggagtatcttcgttcgagagataaatggacgattgagaataagctgtttggcctgcaaaccctcggcgatgaccggaatacggtatgtatttatataatgggcaagcaagtatacggctcagattcgtgcgatcatcaagaagcaagtatgtaatacgaccgttacgacgatccataggcgctcggcagtagtcgggcgcaatcccgggaaatgatattctatagccccgtgcttgcaagcggagaggcaatctccgcaataggtacaggtatagccgatctttcccttctcgatctcttctttatgtagggcatcataacggcaagcgtttgtgcaagccatgcaatggcaacaatccgtggtcagtcgtacccggaaaggagagaggtatttgaggaaagacactaaagtcccgatcggacaataactactgcaatgcaccatcttccgtctctttctggaaaacaatagcatgacaagtaggccgataactccgaccgctattccaaaagcggtggctatcctgccgctcgccccgaatattcggagtaggatggcccccaacataaccagaaataatatgctgtatcgcatttgcttgtgataggggaacctttttcgttccaattttccccgggcactccatgcgtcaaatgccccgaagtaacaaagctggctacaccaagcgggaccggatagtaataaggtgctgataaaaagtatgggcatgaataatccctcgaagcgataaagcggtccggccaagattaccgcggggatcggtaaatgcagttttccggtcataaggaaaataggatcggcaaaaatccctagagcaagttgcccgaaaaaaacgatcgagaataacaaccacgctcgttttctccatttgggacgttcttgccgatcttgcatcttatagcagagccaaccaccgtatagcatggcaagtatcacttgtatccatcctccatacggaaataacctttcgcctatcaatagtggatttttaggcatgacttgaacgatcgagagaagtcccccgactaataatacggtactgataacaatacgtctcgttttcatgctcaattattttatgcgtaaaagtatgccttttatgcgaataattatagcacgggcattgtatttctgatacttgttacaccgattaaacgatcataccgtgctcccatcgggcaataatagacgtaaatgctatattcgttctccgtctggaagaaattaccctcgatagggccggtctgtcctacggtctgtccgttagggacaaagaggtactgatagttgtaactgccttgtttcagtaagacggatttctcgtattgatgcgtctccggattatagcccatcttacttttctcgtccaatacattattatataattcgccgttcaaatacacgtttccatcgggaattaagtccatggcgagggtaaagtgaacgatgtaatagtccgcttccgtatccgggtcgttacaattactgcaacggatgaaaaaacggccgtcttggtcttgatcgtattgatacgataattggtcacgccgatagtccgtcatcaactctacatggtagtatggattatggaacgagatactttctacgtgcatgccattgtatttgttgctcaaaaattccatacggcgatattcgtttcctgcgggaaagatcaagttctgattgttcgtataagagatctggttttctaaaatagtcataggctgaagacctgttacggcattatccctgcggttattctgataaacccagattttcaagtcggtctgaggataggtgatggggaaattcttgttattgatcgcaaagctgacttgttggtgtgactgattggtatcgatatccgtatttccgctcaccgtagcgacgacactaaccatcggctcgaaaatagaaaagcaagcggtaaatacgatctgggagggatcatcctcgttatatacttgcaaggcataattccccgagaccttcggttgaatgtcatcgtttgggaaaagtaatcggtagttggtgtattgcaccgtagtacccatcgcattggcgaaatcctcgatcgtgctcccttggaaaccattcatatactcaatcggggaaagattcgattgcgtccaatcggcgttgcaatgaaccagattataggcgtatcgcccgaagcccggattaaaagcatcgaaattaacctcgatacgattctcaccacccagttcgatgaatggatcggagaacatctcgccggcaaccttcacttggagggtctttatttgcttatcgctaacgttggtgaagtaagtcacttgagcgttcaacggtactaaaaccgtgataagcagcagaaataggattttaaaaactttcattttcttattactttctttaacgacgcaaaattatggaattatttctctatttatttgcctttccctgctctaaagcatgaaaaaatgtttacttttgcaggaaaattacatataaacaattttagttgtatcatggcaaatgtgattaagattaaaaagggtttagacattaatctgaagggcaaagcttcggatgtactgttaaacggcggcaagagcgagtcttacgcgatcgtccccgattattataacggtattctccctaaagttgttgcgaaagtaggagaaaaagtcaaagccggttctgtactgatgattgacaagaaccgccccgagatcaagtttgtttcgccggtcagtggcgaggtaactgccgtaaaccgaggagagaagcgtaaggtgctaagcatcgttgtgaagccggatgcgcagatcgagtatgaggagttcggtaagaagaacgtagcatccctacagggagcagaggtgaaagaggtacttctgaacgctggtatgtggccgtttatcaagcaacgcccatacgatatcgttgccgctccattagatactccgcgtgatatcttcgtttcggctttttactccgctccgttggctccaaacttcgattttatcgtaaaaggtcaggaggctgatttccagactggattaaacgccctagctaaattaacgaatggaaaagtgtatgtgggtgtaagaagtggttctgtcgtgagcggaatgaaaggtgtggagatcgtggaagtagaaggtccgcatcccgcagcgaacgttggcgtgcagatcaatcatatcaagcccgttaacaagggtgaggtagtttggacggttaatccggcagacgtgatcgttatcggacgtttgttcaacaagggtgtcgccgatttcagccgtatggttgctattaccggttccgagactaccgagagaggctacgttaaaacgatttcaggttgtacgattaagagcttggttaacggtaaagtgttaggacaggaacatatccgtattatcagcggtaatgttttgacaggtaccaaggtaaatatggatggttacctaggcgcttatgataaccagatcaccgtgattccggaaggtgatgagacgcatgagttcttaggtttcgctatgcctcgtttcaaccagttcagcgctagccatagttactttagctggttaggtactagcaaggaatatgtgatcgacgcccgtatcaaaggtggtaaacgtgccatgatcatgtctaatgaatacgataaggtgttcccgatggatatctatccggagtatttgttgaaagcgattattgcgttcgatatcgacaagatggagaacttaggtatctatgaggtggctcccgaggacttcgctctttgcgagttcgtggacacttccaagatcgagttgcaaaagatcgttcgcgacggattgaacctgttgtataaggaaatgaattaataacataaaaaacttataatacattgaaagcgttaaggaattatctcgacaagattaagcctaactttgaggaaggcggaaagctggcgatgttccgttctgtttttgacggtttcgaaacattcttatttgttccgaacgagacctctaaaacgggcgtacatattcatgactgtattgattcaaagcgtgccatgaccgtggttatcatcgctttgttgcctgctttgctttttggtatgtataatgtcggttatcagcacaatttagctgtgggggctgagccgggatttttgatgacttttatttttggatttttggcggtattgcctaagatcattgtttcgtatgtggtaggtttgggtatagagttcgctgtcgcccaagtgaagaaggaagagattcaggaaggattcttggtttcaggtatcttgatcccgatgatcgttccggtcgatactccgttatggatgatcgccgtagctactgctttcgctgttattttcgcgaaagaggtatttggtggtacgggatataatatatttaatgtagcattggttacacgtgcgttcttattcttcgcttacccggcagcaatgtctggtgatcaagtgttcgttcgtacggctgatacgtttggtattggggctggccaagtggttgacggcttttccggagctactccgctgggacaagtcgctatcgctggtaaggagatgatcggttctttccaagctgttgacgtattaggcaacccgatctctacttgggacgcatttattggtttgatcccgggctctatcggtgagacttccgtattggctattttgatcggtgcggttatcttgttggttacgggtatcgcaagttggaagacaatggtttccgtgttcgtgggtggtgctttcatgtcattgatctttaatatggtcggtacaacggtcgctatgtgcgtatctccgctggatcacttgttcttaggtggtttcgcttttggtgccgtgttcatggctacagaccctgtgacttccgctcgtacggagacaggtaaatatatctatggtttccttgtaggtgctatggccattattattcgtgcgttgaacccgggttatccagagggtatgatgctcgctatcctgttgatgaacgtgttcgctccgctgatcgactattacgttgtggaagctaatatctctcgcagattgaaacgtgtaataaaataaagtaagaaggaatatggctaaatataaatgtaaggtatgtggctatgtccacgagggaaataaggctcctgacacttgcccggtatgttccgctcctgcttccgaatttgaggaaatcaaggaggagggcgccgctaagaaaggcataaaccgggatagcaatgtttatacggttgtttatgcggctgtgatggttgtgctagtggctgtcgtattggcgtttacttcacaatcattgagaagttttcagaaacagaacgaggataacgataagagacaacaaattctgcgttctatcaacgtaaatgtttcttcttctgaggctgagaccaagtacaacgagttgatcaaggaagctttcttggtaaatgagaatggtgagaaggttgaaggcgacgctttcgctacggatgtagttaaggctgccgctgagcatcaatatccggttttcgtcgcaaatgtagatggtcaaccgaaatatatcatggctttgcatggagcaggtctttggggtccgttatggggttatatctctgtagatagtgataagaatactatttatggtgctgacttcagccaccaaggtgaaactccgggtctgggagcagagatctctaaaccggtgttcagcaatgagttcaaaggtaagaagatcttcatgagtggagaattcaagtctgtcgctgttgttaagccgggtaagagcgtagcgggacaggattatgtagacggtatctcaggtggtacaattaccagtaaaggtgtggatgaaatgttattcaacagcttgagcggttatgttaaatttttgacctcacaaaattaagtagaagatgggattattatctgaaaagaataaagaagttctgttaggcccgttgagcgctaacaacccggttgtcgttcagatgttgggtatttgttctgcgttggctgtaacatcaaaacttgagccggccatcgtgatgggtatctcggtgacggctgtcgtggctttcgctaacgtgatcatttcattgatgcgtaatacgattccgaaccgtatccgtattatcgtgcaattggtggtagttgccgctttggtgacaatcgttagtgaggtgttgaaagcttttgcttatgacgtaaacaaacagctttccgtatttgtcggtttgatcattacgaactgtatcttgatgggacgtctggaagcgttcgccttgggtaacggcccatgggaatcgttcttggatggcataggtaacggtctgggatatgcgattattcttattatcgtaggtttcttccgtgaattgctgggatctggtaccttattgggtttccaagtgattccgcaggcattctatgatctgggttacgtgaacaatggtttgatgatcttgcctccgatggcgttgatcgtgatcgctgttattatttgggttcatcgtgctaagaacaaggaacttcaagaaaattaatgttaacgattaaacgaataatagaatggaacaattattaagcacattcgtccgctcgatcttcgttgacaacatgatcttcgcatactatttgggtatgtgctctttcgtggctgtctcaaagaacgtgaagaccgctttaggattaggtatagcagtgacattcgtacttttctgtacgttgccgattaactatatgcttgagaattatgtattgaaagaaggtgcgttaagttggttaggcccggaatatgcggaggtgaaccttagcttcttggcgtttattatctttatcgccgttatcgcttctttcgtgcagttggtcgagatggtagtcgagaaattctctccgtctttgtatgcttcccttggtatctttttgccgctgatcgctgtaaactgcgctatcttgggtggttctctgtttatgcaacaaaaggcgttccctaatgtaggtgtcgccactgtttatggtttaggatctggtatcggttggttgctggctatcgtaggtatggcggctatccgtgagaaattgtcttattcaaatgtccccaatgccttgaaaggcttgggtattactttcatcatcacgggtttgatgggtatggcattcatgtgtttctctggtctgaagatttaagtattaacgcattaaacaaaatataaagatgactttattaatgtcgggcggacttacgattggtgtcagcgcaatagtattcttattgatcacgctgatcttggtcggtttgcttttgttcgccaaagcaaaattggtgccttcagggaatgtaagcttgaaggttaacggagagaaagatatagagaccccgattggtggaactttgctaggtgcgctacagagcggtggcatcttcttgtcttccgcttgtggtggtggtggtaaatgcggtcagtgccgtgctcaagttattgatggcggtggtgagatcctacctactgaaaaaggtttcttctctcgtaaacaagtgaaagatcattggcgtttggcttgtcaatgcaaggtgaaagaggatatggtcgttcaggtaccagacgaggtatttggcgttaaggaatgggaatgcgaggttatcagtaacaagaacgttgctacatttatcaaggagtttatcgttgcgttgcctaaaggtgagcacatggactttattccgggttcttacgctcagatcaagattcctacatactcaatggattataacaaggatatcgataagagcttgatcggccccgagtatctgccggcttgggagaaattcggtttattcggtttgaagtgtaagaacgactcaccgtctatccgtgcctattctatggctaactatcctgctgagggtgaccgtatcatgttgaccgtgcgtatcgctacgccgccgttcaaaccgaaaccacaagttggtttcatggatgtgatgccgggtatcgcttcttcttatatctttacgttgaaaccgggtgataaggtgactatgagtggtccttatggtgatttccacccaattttcgattctaagagagagatgatgtggattggtggtggtgctggtatggctccgttgcgtgcccaaatcatgcacatgacgaagacgttgaagactacggatcgtaagatgtcttacttctatggcgcacgtgccttgaacgaagtgttctatttggaagatttcttggaaatagagaaagaattcccaaactttacgttccacttggcgcttgaccgtcctgatcctgccgctgatgctgcgggtgttaaatatacggctggattcgttcatcaagtaatccatgatacttacttgaaggatcacgaggctccggaagatatcgaatactacatgtgtggtccgggcccgatgtcaaaggccgtggaaaatatgctggataacttgggtgtacctcgtgagatgttgcacttcgatgatttcggtggataaaataggatttctatatctgcagatagaaggcgggggttaagatcctcgcctttttattttggccttgaaactcctctttacgaagatatacttcaaatgctataggatatatacttcaaatgctataggatatatactgcatgtgtcataggatatatacttcattaacgaaataagtcgtacttctatgtcggcacattaaaaatgtaattattttgaaataatatgcagcgtttatcgttttataagcatctaagcttatatagtcataaaaacaagttagacatgaagccattgattttatctttttttgcggttttattaggatactcattctttttcgataaagatgatgaaataaaattgcgtaatgttgaccagatatcgttggaatctaattctacgatgcctgagaggggtgattctgtcactttgtatgcgaaaaggctccctaatactccggaatatattttacgaatcgcaaaaccggaggattatctctttacgaaataaaattttcgtgttaaaatatttgtttatttgacgaatattgctatgtttgtgcccatgtaacttttaatgcgtgggatatggatttgaaatctactcaatatatagaaaaaacaggaagtgtcgcaaaggcattcctgtttctttttcttctctttctatcaagcatatataatctgtttaagtttgccagccttgaaaatgaggaggtagaagtatcagatatggtgctaccttctaagacttccggtgatgtcgagtatatagaacaagatgacttatctgcaagctgtaaattcctgatcgatagaactactcactggttgggctgagtaagcccttatctgatccgtgcgagtgcatagaaggataagggggacttattttagataattaaacgattttctccaatagattgtattccggtatatcttcgaggaaagcatacgtctgtttctcatagtcaattttgcaacaaaaatgacggatgccgttgcttacggttaagtattttacgtgtaagaccatgttataacgtacgatttgatcgaatactgcgcttgttatctcgatgtgtggagctttatattcaataatcattagaggtgctagaaaccgattgtatgcaacggtatcgcatcgtttggatgttccgtttagttttaccgctacttcattcgctaaaagttcttgaggatagcttttttccgtgaccaaatagttcacgaaatgttgtcgtacccattcctctggcgttaatgcgacaaattttcggcgtacaggatcccaaatagaaggctttcctgctttctccgtaactttgactgagaattttggtagatttaatgggagcatttgctatatttgctatttatattctaaactaaaatgcacctcaaaggtagttatttatgagaacaaaacaagaaatcgtagaaaattggctgcctcgttataccgagcgaaagctagaagacttcactaagcacatattactcactaactttactaaatatgtcgagatatttgcggatcattttaatgtcccgattttgggattgaaaagttcgatgcctaatgcctcggcagaagggattaccattatcaattttgggatgggaagtgcgaacgctgctacaatcatggatttattgtcagcagtcatgcccaaagcggtgcttttcctcggtaaatgtggaggattaaaaagagcgaatgtattaggggattatgtattgccaatagcggcgatccgaggtgagggaacgtcgaatgagtatttaccacctgaggtaccttcattgcccgctttttcaatgcttcgtgccatttcttccgccatacgtgatcatggaaaagattattggacaggtacgatttacacgacaaatcgcagggtttgggaatacgataatgctttcaaggaatatcttcgtagtacgcatgccactggtatcgatatggaaaccgcaaccttgcttactgccggtttcgctaaccaaatacctacgggtgcattgttgatgatatcggataaaccgatggaagaagatggtgtaaaaacagaagcgagtgaccggaaggtaactcaacaatttgtaggagaacaggtaatgttgggagttgaagctcttcaacagattttggatggtaagaaaaccatccgtcatatccgttttagttggtaatagcgaaacctcataatttatggcaaaaaaagaaattactttcgaggagatttgtagggatataacagcaaggaagtttcagcctgtttatgtgttaatgggcgaagagcctttcttcatcgatcaaataacagatttgttattaaaaagcgtattagaggaatctgagagagatttcaatcagattattctatacggcgcagatacagatgctatttctattatcaatgcggcacgtcgttttccgatgatgtccgaatatcaattgatcgttgttcgagaggctcaattagtgagagatatagagttgctgagcagttatgtgaagaatcctttgtcatcaactattttggtcataaattacaaatataagactttagatcgccgtcgtgcgttagcggccgcaaccgataaaaacggtattttatatgagtcaaaaaagatcccggattataaaatgccgagttttatcacctctttgatgcaacagcgttctatcggtatcgatccaaaagccgctcaaatgctctcagatttccttggaaacgatttaaaccgtctcaataaggaattagataagctggcaattatcttggctgaaaaggcctcaaaacgcatcacaccggaattgatcgagcaaaatatagggattagtaaagaatacaataactttgagctgataaaggcacttgccatgaaggatatattaaaggctaaccggatcgctcagtattttgagaaaaaccctaaaagtaatccgatacagatgacacttcctgtattatttaactatttttcaaacttgctgatttgttattattcaaaggatcgatcggaatcaggattgatgaccgcacttggtttacggggaacttatcaagtaaaggactatcttttggggatgaaaaattatccagcgatgaaagtttttaatttgatcagcgatatccgaacgactgacgcaagatctaagggagtggaaaactcttcagcgacagatgcagatttactaaaagaattactttacaaaattttacattaaacagaaatcatagacttagtgcaggcaaaagggccttttttcctagaatgatgaaaaagtcaaactggaaaaagaggcctttttgtttatttatcaattaattacgcatattttatctctctgagattttaaaatttattcaatcacgtacttcttcctcaaaaattccaagaaatccatacttaaagctataatcggtatagccatagattgccttcattatccgttaaaggaaaaatagacaagttggcagtaaaataaatagagtaaaattatattgtatacaaatataaccgaggaatggatgtttacaatcatatatacaataaaagtatttgagtagattacaaatgttggtggtttttgtaatcattatatagacgttacaaatgtatcatgtttacattactaatataaatcatggattactatatatttctttatccacgtaagatttgctataaattataaataaccagttttttatatagaaatattgattgtttacattaactaaacatgttttttcgtctacaaacgtataaaaaccccctaactatacattatatgtattattatatttacatatagatcagatatatatgctatttttctaaagtttttctaaatactctatacctccttcttgaacacggtttacagttctacccatcacatatgtatcggtgtgacacatatgtatcaatttagttttataaaaataaattgcacaaatggaaatattgatttatctttgtatccagtttactttatggacatttatcttagtaaacggtcataatggcagtattctagtaagaatttaagatatatatgaatatgagagatcgtattttaaaaataatggaacgtgaaggacttaccccttctaaatttgccgaatcgatcggtatacagcgttcggcaatgtcacatattatatctgggagaaataatccgagtttggatgttctgctaaaaatactggaacggttcacttatgttgattctgactggctattgtttggcaaaggcgaaatgatccgagaacatgtgttaactgaacctaatttgtttacaaatatgcttgaaaatcgtcccaatgtacaagttgttgccgaaaatcgcaaggaaattggggttgagacacctgtaaacatccagaaacaacctgttgtagagcaagttatatgccaagaaaagccttctaaaaatgttagtaaaataatgatattttactccgacaatacgtttgatactttcgtccctgaaaaaaacaagaaagactaaggtaaactgttcggtatatacgttatattcatgtatctttgcggataaattgagtaatcgtgtatatgaagaagtacatcttagacatgaaggtaactgaaaactgtcaccttcataaaaattattgcctgctaaagttaacctcggatgggaatcttccagagatgcttcccggacaatttgtagaggttcatgtagaaaactctcctacaacattcttacgtcgtccgatttctgtcaactatgtagataagtctaaaaatgagttgtggttattgattcaacttgttggtgatggcacgagaaaaatggcagaattccgtcccggtgatattgtaaacataatgctaccactgggtaatagttttacaattccttccaaggaacaggagaacaaaagacttttgctgattggtggtggtgttggaaccgctccgatgttatatctaggagcttgtttaaaagaagccggttttgagcctacttttctacttggggctcgttctaaggatgatgtattgcaattagatgaattccagagatttggtaaggtttatatcacaaccgaagatggttcgctaggcgagaaagggtatgtgactaaccatacgatccttaaagaggttcgatttgaccagatttatacttgtggtcctaaaccaatgatggtggcggtagcgaaatacgcaggtgcggaagctatttcttgtgaggtttctcttgagaacacgatggcttgtggcataggtgcttgtttgtgctgcgtagagaaaaacaaggaaggtcataatgtgtgtgtatgtacagaaggtcccgtatttaatattgagaaattgtcatggctgaattaaatgtaaacattgggaatttaccgttgaaaaatccggtaatgacagcatccggcacgttcggatatggtatagaatatgctgatttcatggatatttcacgtttggggggtattttcgtgaaaggtaccactatccaacctcgtgaaggtaatgattatccaagaatggcggagactccttccggaatgttgaatgctgtggggcttcagaataagggcgccgattatttcgctgagcatatttatccggagatcaaggacatcgatacgaatatgatcgtaaacgtgagtgggtcttctgttgaaacgtatgtcgagtgtgcggaaaagatcgcagagttagataggattcccgctatcgaactgaacatttcttgtccgaatgtaaagcaaggtggtatggctttcggcgttactacgtgtggtgcaggagaggttgttaaggctgttcgtagggtttatccaaagacacttattgtaaaactttctcctaatgtaactgatattacggagatcgctaaagctgttgaagcggagggtgcggattctgtttcgttaattaatacgatgcttggaatggccatcgacgcagagaaacgtaaacctatattatctacaataactggaggtctttccgggccttgcgtaaaacctgtagctctacgtatggtatggcaaacgtatcatgcggtaaagattccaattataggtttgggaggtatttcaaattggaaagatgccgtggagttcatgttagctggggctagtgctatccagatcggaacttataactttgtagatccaactgtttctatcaaggttattgatggattgaatgactattgtgaccgacatggttttaaatcagtaaaagagttgatcggagcattggatattcagagataatctaagttcatttatagactttatttccattttttcaataataaaaaaggatgtgttcgcttacgcaaaaagaacacatcctttctttttattatgaaaaattattcgatctctaatacggccggacaatgatcagaatgtacggcatcgtttaatatataagcggctttaactttcggcttcatattgtcgctaaccatacaataatcaatacgccatcctttatttttaaatctggaattgaagcgataactccaccatgtatattcttgcttatccgggttcaagaagcgaaatgtatccgtaaaacctgcggataagaagcgagtcatccattcccgttcttccggaaggaaaccactgttctttgcgttcctgatcggatcatgaatatctatcggctcgtggcaaatgttgtaatcgccacagagaattaagttcggacgggatttctgtaactcaacgacatatttctggaaatcttccagccatatcatcttaaaatcctgccgttcatccccactagtcccggaaggatgatagacacttacgatcgatacatccccgaaatcagcacggaggaaacgtccctcattatcatacttctcgatccccattccatactcgatatgatccggttcctgtttcgtaagaatggccacgccactatatcccttcttttgggcactaaacaaataagacttatatcctaaagtctcgaatgtttctgacgggaactggtctggttgcaactttgtctcttggatacataacacgtccggctgttcttgagccaaccattcgggcaagcctttacctacggcagcccttaatccatttgtattgtacgttattattttcaatttttctaagtttagaggtgaatgacttttattctgtctcaaagatacaacttttgacgattttacattgttttcattccataatcggtacatagaaattttctatatttgtataacttagaatgaatgacagactatgctggaacatttgaacgatattttagagaatactcagataacggcctcgaccgccgccgtacgattagctatcagcttcgtgcttggcgctattatcggtgtagaaagacaatttcgccgtagggacgctggtatgcggacctttaccttgatctgtatgggatctgccgccgccatgttgatatctatctggataccacaaacctatccgaatttcttgaatggagatccggggcgtatcgccgcccaagtccttacaggtattggtttcttgggagcaggagctattattcaaagtcatggaagcgtgcatggactcactacggcggcttgtatttgggtaatggctgtagtaggtttggccgctggtgccggtatgttcttggccgcttctatcactacggcatttaccttgttcgtattggtttctttagaaaggctggagcgacgtatgtatttggatggtgttaataaaatacttacgataaattgctcaacctcgactcccgatcttaaaggtatccggaaaatcttggaaaataggagcatatttatcgtaagtctttcttatgagcataattacgacaagaatacgtcgacaattacctataaagtcaatgtgaaatccaagtcctcttacagtgagttattcactgagattcgaaaacttggttatatttcacaaatacgtcttctagcttgacaatgccgtttattcaagttcaccctttagcatatgcccggcgatacgagccgcttccttaacgtatttaccgcaaggacgtttggcataatactgttgcgtgcgtgcggaaggagcgggattcgtcgatgtctcttccggaggaagaaggctacggcaaatgatcgtcccatgcttctccttgaataaagccgccattttttgtaccatgccatagttgcgggcacgcgcctcttgatctagcggatcaaataccggatacttaaatccggctaacatcgccattgcgtttacggtaccacaaacctcacgcatgcgtccgacacctcctccaaaagatacagacatctttttcgccagctctaaatccaactcgaagacatccgaataagcgaggaatacagattgagcgcaattatatccggactcgaagttgtggaccgcttggttcacacgctcctctatatcaaaggatttcatagtcaacacaagctctgtccgcctttaccgggccaataattcctttagcgaccgctacatgttccggatgattagcgtacgtatttacatcttccaaggtagacaattcagtagttaaaataatatcccaagtctccgccggattacaattaaaatctacacggatcattttcaatacgtctatcttattgattaaggcttccagtttatccttaatttcttgcattttggcttgcttctcagccggagtttgaaactccttcaacttaaacattacaatatgtctgatcataatcgctatacattaattatatatattacatctgttcatccaaatacgaatccttgtatccaaggaaatataagataccatcgaggccaatcgtagagatagattgcttggcggtcgcctttaccttcggtttggcatggaaggcgatacctagaccggcgatactaatcatcggcaagtcgttcgccccgtcgccaaccgctacggtctggcgaatatccacgttctccacttgcgcgatcaggcgtaataattccgctttccgcttcccatctacgatatcgcccacatgattacccgttagcttgccattctcgatctcaagctcgttggcgtatacatagtcgatattatatttttgtttaaggaaattaccgaaataagtgaaacctccggaaaggatagcgatcttgaagcccacctttttcaagatacgcatcaaacggtctacaccttctgtgatcggtagattctcggcgatctcctgcatcacggatacgtccaacccctttaataaggcacaacgctggcggaagctctcgcagaaatcgatctctccacgcatggctgcctctgtaatcgcttttacttgatcgccaactccggcacgtatcgccaactcgtcgataacctccgtctctatcaaggtagagtccatatcgaaacaaatcagacggcgcatacggcgatacatgctatcctcttggaaagagatatccatctcaagctccgtggaaagtttcatgaactccgctttcatgcactccttgtttttcggggtaccacgtacggaaaactccacgctcgccttgggagtacgggcattctcgtccaacgggatacgtcccgtgagccgcttgatatcatcaatattcatatcttgctccgctacgatccgggaaacacccgcgatttgcttggccgtaagctttcggcttaatatcgtgatgatatatcggttcttgccctgcatacctacccatttactatattcttgctctgtaatgggattgaaacggatattgacgtctaattcgtaactcttgaacagtagttctttcaatatatcgccggaatttccttccgtgctttgaaacaagatacccaatgataaatggttatggatatccgcttgaccgatatcgaggataacagcgttgttcttggctagaatctccgtaagagccgccgttacacccggacgatccgctccattgatatttatcagtattatttcgtcgttttgtgccatatttgtcattctattaggcaaaagtacgtaagaattatcgaaaaagagtatattatattaaacatttttgcttatatttgttttatcgtattaacgacaaaatgtttaatgagaacctggcaaccttaaaaagtcctgaccggcaggcgaaatgtatgagaatccaatttgaaatcaaggaaaagttgcccgacattatttctgaaatacttcattcagataagtggctgactttagtgagagatgagaatcatggattgcgacgtgtgacgattaaagatccctactttgattcagaggcatgcgtcgatatctgggagcatgagattcatgtaacgacagcttggtctaactacacctatcgaatctatcaaaaaggtaattctgtttggtgcgaatacattggcgcttatagaggattgctggaacaaaaccttttgccgacgatgactccgaaagaaaatattctggattcggaagtattgaacagttctttgtttggtgacagaaaggagaccttgagaaattacagcgcggaaaaccttaagctgaagaattttaggcgggataatttcgccgcggaatatcaactggcttctccgcaagaccatcctaagatcgtatatgatgagtttattaaagaaggggttccaattccccctcctgaagatagaaaagaaaagtccggtaattaataccggactttttttatttgaggatcatcgcatgatacccgaatcctcgtcactattccaaagtttcttattggcctccttgaacttgcggccgaagtcaaaattccaagagaaggttagcatcaacattcggctgaagtcgttcgcgtacatgttcgtacggctgggagcgtaagcgttccgattttcctctacccgtttgtactggctggagaaaggcatcatcaatccggctccaacggcgaatttaccttgattgtaccggaacataaacatatggatattctcgccgccatgcaataattcgccgacaaacgtattatagctactttgtatctggaacatagccatgaatttcttgtacatagccatgacggaagcccggtaataccaattgttataggtatgcgagtaactatttccttcgctgatataacgattgactccacctgtcacggataggcttatgatccgcttgatgatagggccgacacgtaatgtcaagtcaccgcttagtttctgccatcctttttggttatcggtaatgcgaatgaacttattattttctcgtatcacttcctccatgatctggtccgggctattactgtaataaaagtttaagtctccggtgaatattccttttttatatagataattggcttgcatgtcataactcttatagggtttcagataaggatttccccggcgtatctgtagcgtatcgatatattgctcgatggcgcttagttccgataggctaggtgagacattatttacgctaccgtttacccggaaatacatattatccgtaaagttatattgtaaggatacctttgggcggaacgtataatattgataatcttcctcgccttcttgcttgaaccatgagcgggagacacctattccggcggtataattcaacttcttgacacgtccgctgaattccgtatagagatacgtctccgactgtttcatcttggttcgtcctccaaccgttccgctgtaggtgttatccgtccacgattgggtgtgtttcaatcctcctcccaatcgaccggcctcgaattgccgttcgtagattccctcgccgatgatggaatatttgtctccgtccacgttcgacaagatatccgataagaggatatcgtttttccattcttgatacatttggtttgcgttcgtatgtatgtacgtacctaccatattaagtatcaatgtctgcttatgtggtaaggagcgttggtaataaaggtcgagggaaggacgtttggtagagttgctatttggattccaagcgtatgtcttatcctcgggattattgttggtatacaggttcttgccgccacctttatcctcgtctgataagaaatagcgtagcgtagcattgaaataataatggtcgttatctaccagattataattaagagagaggttatgagcggtctcggacattcctcttggcagaccttccgaggtacgttccatcgtctcgccactctcaaagcggaaggtctcgactccttccgtccagatatgatacggattccggtaacggacggcgtattgcaatccgaactccgatttcttatgattgaacttcgtcgatacctgatcgtctccaaaagaggtggtcggtgaattactaagatccagattgacagaaccgccgctagtttccctccggacaatgtagtcgagtacgacagaggcgttaccgtaacgtaagcccggattatcatgatattctacccggattacctcctgtggcgataagccccggatatcggatagctccaccttgataccgttgatgcagaattgaatagtcccttcattcggtagcgatacgctattccgaatcgggtctacttccaaacgaggaagcatcaaggcgttcaataggttgatgccattgctggaagccgctttttgctcagaggtagggaacgtgatcttacggtccgccgtattgcggatagcggaagcgttgaccgtgacttcatctaaggatatagaggaggatgccaatgagatcgtaccgagatctataggctgggaaagtcccagcacggagactaccgaggtcttgtaacctatggaggaaacagatacttgataatctccggccttgactttctcgatccggaaaagtcctttactatccgtcgtcgtccctgtgataaatgcggaatcggctgtttgaagcgtgatattcgcaaactcaagaggagacttgtcggatagatcaatgactttccccctgatctgtaattgctgtgcccggataccccaagaaaaagatataagaagggccgccataatgatttgtttcattatagtacgatttaatgattaagaaataatgtgtgtatgtgattgttacctagtccaaatctcttctccgttcagacggatcttctggatattgttgatacggatatgcaacgtgagatttttatcttgcccggcgcccctcgccccgctaaccaataatagagaatcgtggcggctgacttccggcaaataccgtttcattccctcgtaatagagtaacgaccggtcctttgcttccagtatttgcccccggggaaattcggaggcggttctcgtatcgacttttatgttttccgctttcaactccggattatctatctggataatctgaaacttttgcgtgaaacctgtaaggcatttttccgacgtaaactgggcagcgccgaaagtgagggctggaacgatatataatgtcgctatcaaggcgataaacacgcgattactttttttcatgattgtctttatttaatggtagatatatataatgtataggctttcgtaagctcgtcgatacctacgcctagcaggtgcatctccttgaatacagcgggaagcacctcttccacgaactggttatggcgcatctcacggattttccgctcggcgtcggaagcaacgaagtagccgatcccacgcttgttgtaaataatctcattcgcttgcagacgttcgaaggaacgcatgaccgtgttcggattcacttccatctctaccgccagttcccgtaccgaagggatacggctatcggctttgtaattaccactcaatacccggtcgcaaatccgctcggctatctggataaatatggattgattcgtattgtagttcatcttagttccttttctttaagttttagataagcgacgtataagaccacgagggtagcgatgagaaatgcgggtgtaaaggcaaaacttagccaatacacggcggtataaagtggggaagactcataacagaacctatccatacccggctggatgttcaacgtgcttatgcatagatagacaatccctatgatagaggcaactatcaatatatatccgccacaagcgattcctaaagcatacttcttgaatgtaacgtaagagaggaacatcaaggaaccgacaaacgccagcatggtgaactcttgcaagggcatggtaatgtccttgaatgctacaggctgtatatgaatgagcattgaggctattcccgtcccagtccagaacgtgacttggtatgttaagaataccacgatgccttcgatcaagatagcggcaaatttctcttggttgctcgcgggaagcgttaagaacaatcctctaggacggtgtatcattaagtttacgtagctacagaaagcgataaaagtccccaatgatcccaatacatataatgtaagggtacggaatctcgtatcccataaaatggaggataacaggaaaaagaagaggactccgaggatgaccaacaccccataagctaatttcttcttattctctatccaatctttgcgaagtaaaagattgatgcgttgtatactgaaatctgttttcatatctatgtgtattttaggagttcatgattctttggatctctttgggataagttatcgccgcattaaagagcaactctaaggatacggctgtctcttccttgtcctcccgtgcggtgacgcctattgtcccttgcggggtaggctcggaataaagagctttctcttccggcaggagtggtccgaaataaagtttctcgccgatctcgttcaacgtcttattcaataggatttgcctttggtctaagatcaataccgtgtcgatcaagctttccagatccctgacctgatgcgtggagataataaccgtctgattgtcatctatcaaagaggctaccagtctgcggaatgtcgctttcgagggaatgtccagcccatttgttggttcatccattagaagcaggggcgtatgagcggccagcgccaaggttatcgccacctttttccgttgtccttgagacattttcgacaggcgatcggatagattgatctcaaacgattctacgcaagccttgcagatatcgtccctaaatgtcggataaaaaggcgcgtacatctttatatattctatggcggtgacctcaggcatggagatttcctccggcaataagaagatctgctgcaagaaacgagcgtttctctcggaaggaatttcctccaatacgaggcaagaaccttgatccggaaagatctgtccgcttagaaggtttagaagcgtagtctttccttcaccgttctttcccaataagccacagatgtgtcccgatccaacctcaagattgatacgatcaagtacctcttttttgcggctatagctgaatgagagttcttttaatgtaatcatatgttttgctgctttagtgtattagtttaatagtacactgcaaatgtagtggaagtttttgaataaacaagagggaagggtatttttttccttttatttttcaagatggcagtacaaggtgattaaagggaatctcttaatgctattagcctcttttccaagaaggattagcggtttgctcttgaagcattgctaatttttcagttggtgcatgatcttctaacggctgttggaagatcatgcaccaactgttagatgattatgcaacagccgttggataatctatacttaaagatgaaatcgctaaggattccctgttatcggtctaaaggtaggggagcgggaagctaatgattcttgatgattttgcggttctctcggggagaaaaaggtactctacttctaaatttatgttgcaaaacagttgattttttatcgatgtgtgcgctaaaacatataaaaaagcttgctaatttgcagaaaatcgctatataatttggtggaaagaagtatttggctttatatttgcacccgttaaagacaagtaagtgtctctttagcgaaagaaacatgcttgtttacgatcctgaaaatcaggagtcgggagtttatcccccgggagattcccccgattaagtttaacgtaaaattgaaaatatgaaggtaagagcttatgttctcatcgcatcggtagcgttattaggaatgtctgccggttcgaaaaaggcgaaacttaccgagggtgtgaaccccggtgatctagctccgagaatagagtttttgggaaacgacgctaaagccagtttccacaaccaattaggacgttatacattgctcaacttttgggcggcttacgatgcggaatcgcgggctcgtaacgtgcaattggcgaatgaggttaacaagtttggtccggacaaaatcgcgatgtgttcgatctctatggatgagaaagaatctatttttaccgagacggtaaagattgacaagttggatctgtcaacgcaatttcacgaaggactgggtaaagagtcagagttgtacaagaagtatgatttaagaaaaggtttcaagaacttcttgattaacgacgaaggagtgataatcgccgccaacgtcaccccggaaaaactgaccgagattctgaaagcaatttaatcagtattatttagcaaagagggctgttccacttcaagatgggacagcctttttttatcgattcacaagttttcgtttcgagatgatgaaatagcatgtatagtctgagaaggaaatgtacgctttctttttaagtccgtgtttattattaactctttttgatttattaaccctaatggatagggtgattgagaaggtcctctgtctttactgtaaatgaacaactaacatcctataaataatgagatctatacttttctttatttgtttgatctttacctttgagggacaggcgcaagaggtagaaaaatcccatatgtggaaagtagaactctccggtgccttgaataataattcagcatgggaggtagagccatctgttacttatctaccgattccttatgtgggaattactatggggttgcttttctgtaatacgattgagaaagatagttatacggggttttcaagagataatcagtggttctgggattcagatgagagtaatccgggctgtcatttctttgcgttacgtccggccatccagttagtaactcccgcttttaaattcgggaaagacaaggatacgggactctctttggtcgtttcacccggattaaccattcctttgcctgtcaatcaagagtttaatataagctatgttccaaacactcccggggtatggatacctcaaaaattcgatcatataaagaacaagggaggtaaatcgttattttatcatattaaaagtatgttgagcctcgatatagaccagcggtatatattctctttggggtatatattttcgaattttgatttatatagtggagggcgaaacttcattgtagaggggaaaaggcttagtatgcctcggattcgttttatgcattcattctttctaagtatcggatatcggttttaaatcgtttcatacattgtctttctcgtttagcccaaaaagggagagctgtttttaaggctcccccttttgcataagcttatatataataatgtataggatttatcgaattgcttctacttcttccgtacgcaaagggatcttctttcctaatagacgagcgccgttctcggtaatcagatagtcttcctcgttacgtatgccactgaaatccttatatgtaaacaacttctcgtaattgatgaattcggtgaacttgttctggcctctccataaatccattaattcagggatgaagtatacacccggctcgatggtcaagacaaaacccggttccagcttacgtcccaagcgcaatgacttacgtccgaattccgtactcttcggctgtccgtcataaccaacgtatacctctcccagattctccatatcatgtacatccaatcccatcatgtggcctaggccacaaggcataaacatggcgtgagcaccggcttttacggcctccatcggatctcctttcacgaaaccaaggtcctttaaaccctccatgatcactttacaagacaactcatatacatccacgaaaggaatacccgggcgcaaagccgctacggcagcctcatgggcggctacttgaatatcatagatgtctttttgacgggtcgtgaacttagagtcggctgggatggtggacgacatatctccggcatatcccatctcagtctcggcaccggcgtccaataatagcatatcaccgctcttaatcatatgactatgatcatggttgtgcaaggtctgcccattgatcgtggcgatgatagggaaggagagctggtaattgttggcgaaagcgacttccgcaacggcagccgctacatccgactcccggattcccggacgtacggtacgcatggcagtcaggtgcatatcggcggttacgatacaggctttctcgatctcggcaatttcttcctcgctcttgtaattccgttggtttacgacacccatgataaaaggcacggaaggtttctccgcaccgggtacgatacccaaccattggaataacttgatctggtgttccgcacgatacgtcggcagataatggattggctggcctttttgctgggcattcttcaagtatgtctcgatctctttgaaaggacggacttccttgatacctgcggcctcgctcttctcttttagggtgggctgcgtacccatccatacaattgcgtctatagtcaactcatcgccaaagatgatctccttatcgttatcgatatcgatgatagcggataacccggcgtatggcaatccgaagaaatacaagaaggtagagtcttgacggaagtgatacgtattatcggcgtagttcatcccactctcgtcgtttccaaggaatagcaacaaaccggaacctatggtttgtttcagcttagcccggcgggccatataagtttctttactgaacataaggattattttttgttagtgtaccaaagatagtaattaatgtaatatactaggccgacattcgaaattatttcttacattagcccatgtaaaatgtaacctctggtaccttatgaagattcaaagaattcaagaacttaccgatgcctccatcgtctgtggctcagagaaacgggagaacgatgtgcagtgcgcttttgccagcgatctgatgagtgacgtgcttacgctggattgtggtgatgtgctgttggtgacaggactttgtaatttgcaaacgatccgtaccgcggagatggcggaagtttcttatatacttttcgtgcgggggaagaaagtaaccccggatatgctggagctggctcgtgagaacaatatggttcttctggagacggatcattctatgtatcatacggtcggagagctttatagcgcggggctccttcctatatattgagaaaggaggtcgtgagatatgctatttaagtttgagttggagggtggtaatttctcgaaggcgggttatgcgtctagccagataaagaaggtcttgaagcaattggctatcgatccccggatcattaagcgggtggtcgtggcgctttatgaggcggaggtaaatatcgtggctcacgcttggagaggaacggttgtcgctgaattggacgctgataaaatatctttggaactgaaggatgaagggcccggaatcccggatatatcgctagctatgcgtgaagggtattcgacggcatccgaggccgtgcgtgagatgggatttggtgccggaatgggacttccaaatatgaagaagaacgtagatgaattaacgatcgagagccaagtagacgtaggtaccacggtacgtatggtcacatggtttaataaagaaggagcgtagaccatggaggaagctaatttttatcatgccttgaagattgacaatgaccgctgtataggctgtacgcattgcatgaaagagtgccctacgggagcgatccgtatccgggatggtaaggctttgatccataaggattggtgcgtggattgcggcgagtgcttgaaatcgtgcccgacagaggctatctatgtggagcaggatgacttccagcgtatatttgattataaatgcagggtagcgttgatgcccacggtatttatcgggcagttctcaaagtacacgaccgagaaggaaattatcagtgccgttatggaactgggctttacccatgttttccaagtagagtttaccgccgatatgatccataaggaaatggtacggcagatggaaaacgccgaggaaaaaccggtgatcagttctttttgtcccgctatcgtccggttgatacaagtccgtttccctgcgctggtggagaatatcttattggtgaaagcgccggtaaacgcctcggctacttactatcataagatattggaagggcaaggtattccctcggaagagatcggtatcttttatgttacgccttgcgcggcgaaaatcgcggcgttgaagggagcggaaggttactcatctacgatcaaaggcgtgataaatatggataccctatataataaggtataccatattcttaagaatcgcccgagaggatatgagccggaatgcgagcttcctccgccattaacgaaaaaagagatgcgatggagccagacaggaggggaggccaaacatttctccggtcgttgcctcgcgatcgatgagatccataatgtgatcgatttcttggaacgaatggaaacgaccagcgaggtacgtaacgtagactttctggaactgagggcttgcgaccgtagctgtgccggaggtgtattagccgtagcgaaccgtttcctcacggccgagcgtatcatgaagcgatccatgaaccgggataaagtaccgatgatatacgccgccgataatttcgaggctttatcctatttgaggcagcatattacgatccgtccggtgcaaccgaatcccaaacggttgtacgatggaacgatcgatgagatgctgaagaaaatggagcaagtgcggaaattgatgtgctacctaccgggaatcgattgtggcgcttgcggcagtccgaactgtcaaagcttggccgaggatatcgtacgccacgaggctcaattcagtgattgcgtatttatgcaacgtaatatggagaagcacggtaaactagaccaagagcatgccttccgtatcgttgagaagacatgggggaaagatcgtttaaataaggattgttataagaaaggagctaaatatgaaggtttgtgatttagtgaagatgttgaatcttactgtattttgtggagaagagggccttgatacagagataaccggaggctatacgagcgatttattaagtgatgtcatgggacatatcgaggagggtatgctatggattaccatgcaaacccatcagaatatactggccgtggctactttaaaagacgcctccgctgtattgatcgtgaacggaacctctccggatgatgagaccttacaaaaaggtagggaagaggctgtccctcttttaggaactacacgctccgcgttcgaggcttccggtatgatttaccgcttattacagaatgagaatggatgaaacagtatttagctgatttacatatccatacttgcctgtcgccatgtggcagtctggaaatgagtccatcggagatcgtgcgtcgttccttagcgaaaggtttggatgctattgccattacggaccataatacgaccttacaatgcccggagattcaatcccttggcgagagattcggactaagggtctttgcgggcgtagaagttacgacccgtgaggaagcgcattgtctggtttatttcccgaccgatgaatcccgtaagcgattccaacgatatttagaagagcatctccctccaattccaaatgatccggaacgttttggcgatcaagtttgggtgaatgcggagaatgagattctaggagaagtaccctatcttttgctctccgccttggatcaaagcgtaaaccaaatagccgctcaagcacgtaaggtggatgctctatttgtagccgcccatgtagaacgtccgtcattcagcttgatcagtcaattaggttttatagacccctgcttatctttagatgctattgaatataataatcagcaaagatacagtaagttattgtctattcacgggtatttgaaagagcagactcaatactcagcctcggatgctcattaccccgaacaaataggtactcagccctccatttggcaaacggaggaattaaccttcgatggcttacgaaaggcttttgatcaaaaagacaatcacttaattttcgcctctcatggataatctctcgtttcatatcacggatataaccgctaatagtatcagagcaaaagcttctgatatagagatagatatacagataaaggacacatccatatgtattcgtatcgcggataatggctgtggcatggatccggaaacagtctctctgatccgtaatccgttttatacgactcgcacaacacgaaaagtgggtctaggcttacctttcttgatacaaaacgcggagcaaacaggcgggaatgtggaaatatcttccatacagggaaaaggtacggtagttgttgcttgttttgtctcatctcatattgattgtccgcctttgggagatttggcgggtacaatggctatgcttataggcagtaatccagacataaacattcatttctcatatcattcagatctggtttcatttgatatcagtacgcgagagcttaaagaaatcctagagaacatgccattaagtcatccgaaagtcatgctttatttgaaggagttaatagcgaatcaaatagttgcgtcaggctgaattaatcttttcatataggtgatctgatcttttcacagctgtgatacgatcttttcacatccatgaaacaaacgtttcacagccgtgaaaagatctgtgtctttactcaaagcagctacaagctttgcttgaatgcactaatttatccttatcttgctattaattttataattcccattatgtttaatagtattatgaacgatcaaaaaatgactactccgatacatgatacacaaataaaaaaccgcctagtaaccttatattactagacggttccatttattctgaaagaagaaattacttattcatctctgcttcaatagcatcgaatttatcacccatattcaagttgtagtaaatacctcttaaagcagtcatatattctctttcttctggtttcatttggtgagctttctcaaagtaaggaagagcttgcttaaaaaattccttagctttgcctaattcctcttgatattgttttgcgtcgttgatcatattagcctcaccttgcttgtttacaccttggttgtaatatacacgacctaagttagagagagattcgatatagtccggattgatcgccaatgctttcttgaaatactcttcagctttagcgtaatctttcaaaccagtctcataaacacggcccattacatcgtaaagctgtggattgttggaatccttagcgatagctgtgttcaaatattcaatagctttctcatttctattagaatagatgtaattgtttataaggctcattaagaaatactgttcctcggggaatttattcaaaccttcttccaaagtcttctctaaattcacggtatccttagcttgctcatactcatagcataagtattgatatacctcgcttgctctataatccgtatttttagcacgctctaacgctgcgatagctttttgagaatcgccaagttgggtcgctgctacagcggcatagaactgaactgtcatgaagtttgaatctctttcagcgacagcctcacctttaaacatcggcatatcagatattttcaggtattgctcgaagaaatcgtaagctttgttataatctttctgatcgaaatagtaagcaccaccattgatgtaatatacgtggtttgctcctaggatacctttgatatctttcgtgaacttaggtttaacttttcctttttcattaggaagttgatctaactcatatgctttctcaaagtatggcaaaatactacccaatgcctcgtacataacaggctcgtccggttgttggcccaagacttgtttagttctttcgttgctgaactgttgatcctcgataaaaccggcaacataccaagttttagcgtcatcctttgtttctggattttccaaagctcctttaataagagttctggcttccgagaaatcaggagttgaacccttagctatactttgagcctcatttacagcttttttctgtgcaaaagagaccgatgctgcgacacatagtgccactgttaataatactcgtttcattgcgatagtaattttgagattaatatttctatttgtttaaaattattcagttatttcttcgttatcattttgttcgttatcctcctctgattccggtagatcaacatcggtacctagactagcttgattttcactcaactctcttccctcattctcttgtctggcttcttgttccgctttttgctcggctatttcctcttcactctcagacaatactttacatacagaagcgatttcgtcgttgcgcttttctagattaatcaaacgaacaccttgagtagcacgtcctattacgttcaaatcggccactttcatacggatagcgatacccgacttattgataatcattaaatcgttctcgtccgtaacattcttgatggcaactaatttgccggtcttctccgtgatattaatggtttttacgcctttaccgccacgattcgttatacgataatcctcgatagaggaacgttttccatatccctgctcagatacgacgagtacggtctctttttccttgtccttgatacagatcatacctacgacttcatcggtattatcctcgtccaaagtcatacctttcactccggaagccgtacggcccattacacgtactgcgctttcatggaaacggatcgcccggccgttacggttcgctatgatcacctcgttgttgccattcgtcatacatacttggatcaagccatcgtcttcacgcaatgtaatagcgttcacaccgttttgacgaggacgggaataggcctccaacaaggtctttttgatcacacctttcttcgtacagaataataggtaatgagaattaatgaattccgtatcggtggttaatttcttaacacgtataaaagcttgtaccttatcatccggctcgatattcagaagattctggatcgcacgtcctttagcgttcttagctccttccggaatctcgaataccttcaaccaataacatttaccttttgccgtgaagaataataaggttgcgtgcatggatgccggatagatatactcaacgaaatcctcgtccctagtctcggaacccttcgctcctacaccaccacggccttgcgcacggaactcacttaacggggtacgtttgatatatcccatatgagatacggtaatgatcatctcatcatccgcgtagaaatcctccggatttaattcctcagaggcgtaaacgatatccgtcttacgttcgtcgccaaatttatccttgatttccaataattcatctttgataaccttcatacaaaggtcctcattctccagaatctcattcaaataagcgatcaacttctcgatctcctcatattccgcacgcaatttgtcttgttccagacctgtcaactgacgaagtctcatctcgacaatcgcacgtgcttgaagctcagataaagagaaacgttcgatcaaacgctcgatagcctcttgcggactcttggaagacttgataatcgcgattacctcgtctatattatcagaagcgatgatcaagccttctaatatatgagctctctcttccgctttcctcaattcatattttgtacgccggataacgacctcatgacggtgctcaacaaacgccttgattaagtcttttaagttaagcaacctcggacggccgttcaccaaagcgatattattgacgctgaatgaggattgcagagccgtaagcttatacaatttattcagcacgacactcgagtttgcgtcacgtttcacgtcaactacgatacgcataccgctacggtcggactcgtcattgacattggaaatgccatcgatacgcttctcgtttaccaggtcagcgatatacttgatcaactcagccttatttaccaaataaggaatctcggtaataataatcttctcatgattattctccacctcaatctcggctttaccgcgaaggatgatacgtcccctacccgtctcgaaagcgtctttcacgcctgcgtagccataaattgtagcgcctgtagggaagtccggagccttgatatattgcattaagccctctacctcgatatctcccttggcatcgatataagcgatacaaccatctaatacctcgctcaagttatgagttggcatattcgtagccataccaacggcgatacccgatccaccatttacaagtaagttaggaacacgagtcggtaatacggtcggctccttcaacgtatcatcgaagttaagctggaaatctaccgtgtccttatcgatatcccggagcatttcttcggcgagtttactcagtcgtgcctctgtataacgcatagcggcaggactatcaccgtccactgaaccgaagttaccttgtccgtctactaacggataacgcatagaccatgtctgggccatacgaaccatggcgaaatatacagacgagtcgccatgtggatgatatttacctaaaacttcaccaactattctcgcagattttttataaggtttgtcggatgtgttacccagttcattcattccaaataaaatacggcggtgaaccggcttaaagccatccctaacatcaggaagagcacgtgaaacaatgacagacattgaataatcaatgtatgccgatttcatttcctcttcgatgttaatcttaataattctgtcttgatcaaccatttagttttatattaattacactcaatatctcacctctgaaaaattgcactaaggtaaggtttttccgtatactacgaaagaatttgtcttgaaattttgagccttcgggcttttcaaggcttattaaggaataatggcacgaaatttgatgatagttggaatagattatgtaactttgcgtaatcagtacatatataatatagtatgaaaaattattcgaaaagattgattgacgtgattgagtatagccgtgaagaagcggctaggctccagaatagctatatcgggccggaacatttgatgctaggcatcatccgggaaggcgaaggcgaggcaatgcgtgtcttgcgagagctacataccgatccgatggatattaaacgcaagattgagcaagaaataaagaacacattcgattctgaggattctgtccagcatgagatcgctataagtaagactacagaacgtgtcttgcgtatgagtatgctggaatctcgtttattcaaggaagatgagaccgatacggaacatcttctattagcgatattgaaagaggagtttaatgttgctgccaaggtgttgaacgatgcgggtattacttatcgttccgcatataatatattagtaagcggaaccggtttgaacaatatggaggaattcgacgagatcagcgacggatatacggatgatgacgaagatgacgaggacgaaggtttctcttctcgtcgtgaggcatctcgcccctcttccggtactggagcgggagccgctcaaccgaaatcccctaatgatacacctgttctggataacttcggaacggatatgacacgtgccgccgcagaaaaccgtctagatccgattgtgggacgtgagaaggaaatcgagcgtttggcccagatattaagccgtaggaagaaaaataatccggtattgattggtgagccgggtgtgggtaagtcggctatcgtagagggattagctttacgcattattcagcgtaaggtttcccgggtgttattcgataagcgtgtgattagcttggatatggcttctattgtcgccggtacgaaataccgcggacaattcgaggaacgtattaaggctatcttgaatgagttatcgaagaacccgaatatcatcctctttatcgatgagattcatacgattgttggcgctggttccgcttccgggtctatggatgcggcgaatatgctgaaacctgcgttggctcgtggtgagattcaatgcattggcgctactactttggatgaatatcgtaagaatattgagaaagacggtgcgttggaacgtcgtttccagaaagtgatcgttgatccgactacggcggaagaaactttgcagatcttgcgtaatatcaaacctcgttatgaggagcaccataacgtgatctatactgaagatgctttacaagcgtgtgtaaaattgacagaaagatatatcagtgaccgtaatttcccggataaggcgatcgatgctttagacgaggccggttcccgtgtacatatatctaatatcattgttccgaaaagtatcgaagagcttgaggcaaagatcgaggatacgaagaatgagaaattagcggccgtgaaatctcagaactttgagttagccgcaagtttccgtgataaggagcgtcagtatttattgcaactggaggctgcgaaagctaaatgggaacaagagcttcaagaacatcgggagaccgttgatgaagagaaggtcgctgaagttgttgccatgatgtccggtgtacctgttcaacgtatcgctaaggcagagaatgtcaagcttctggaaatggcggacgtattgaaaagtaaggtggtcgggcaggatgatgctgttcaaaagatcgtaaaggcaattcaacgtaaccgtgttggcttgaaagatccgaataagccgatcggaacttttatgttcctaggaccgacgggtgtaggtaaaactcacttggccaagaagcttgctgaatatctatttgattcggcggattctttggtacgtatcgatatgagtgaatacttggagaaattcgctgtttcccgtttgatcggagcgcctcccggatacgttggttacgaggaaggtggccagttaacagagaaagtacgtcgcaagccttattcggtggtcttattggacgagatcgagaaggcgcatccggatgtatttaacttgctgctgcaagtcttggatgaaggccgtttgacggatagtctgggtagacgtattgatttcaagaatacgatcttgatcatgacttccaatattggtacccggcaattgaaagatttcggccgtggcgttggtttcaatacccagatggctggtgagccggataaggatttctcccgtagcgtgatccagaaagcgttgaataaagcatttgctccagagttcttgaaccgtgtggatgatatcattatgttcgatcagcttgataaagccgctattcataagattatcgatattgagttgcagggtctgtatcagcgtgtatcaaatctgggctatgagttgtcgatcacagacgaggcaaaagatttcattgcgacaaaaggctacgatatccaattcggtgcccgtccgttgaagcgtgcgatccagaagtatctggaagatgagatggcggagatgattatccgtgcctcagtaggtgaaggcgatacgattatcgtagactttgataaggaagagcagaaaatcacgacttcgataaaaaagaaagatgctgaataagtttgtctatgaatatagaagccgggcgtgagtccggctttttttatgttcgtccatcttattcgtctgtcattttgacacgcaaaaaaagcatgacctaatagaatagatcatgctcttatttctttttttacttaagtacgcaggatgagacttgaactcacacgccgtaaccggcactaccccctcaaagtagcgtgtctaccaattccaccacctgcgcattttaggaagggtgcccagaacaggactcgaacctgcacgatcgcaaaaccactcgcacctgaaacgagcgcgtctaccaattccgccacctgggcaatcaatacgagaaagagcggaagacgggactcgaacccgcgaccctaaccttggcaaggttatgctctaccaactgagctacttccgcatatgcaaccgctttgttctcgattgcgagtgcaaaggtagtgatttcattgaaaccaccaagcctttgcgctacttttttattagatttttttgaccaattccctaaatagttgtgtcataacagatgctgctttattagccgctacgataacatcggcaccatcatttacaaagtcgtcagcgaagtgataaccttcgttcgtgatgacagacataccgaatacacgcaagcccgcatgacgtgccacgattacttccggtaccgtactcatgccgatcgcatctcccccgacttttccatagaaagcgtactcggaaggagtctcgaaggaagggcctgtcaaacctacatatacacctttctttaacgggatagatcgggaggcggctatttcttccacatagcggataaattcacgatcataagcacgtgtcatatccgggaaacgagtgccgaaatcctcattgttcggaccgatcaatgggttcggcatcatattgatatgatcccggatgatcatcagatcacctaccttgaacgtattattgatacctccggcggcgttcgagaccaaaaggttcttgattcctaagagtttcatcacacgtacggggaaagtcacctgttgcatcgtgtaaccctcatagtaatgaaaacggccttgcatagccaagacttgcttatcccctagtttgccacaaataaaattccccttatgcccggtagcggtagatttcataaaatgtgggatctccacataaggtatcactatagggtctattatttgatcggcaaaagagcctaagccactaccaaggataatggcggtctccgggttaccttcgatccggctagctaaataggcggccgcttcccgatattgttcggttttaatcatttccatatttaatcaatttaacgtttcatcaagttataagctatctctgccgctttctccataatctcgtcctctcccggtaccttcttattctccatcaatattttaccatcacagataacggtatccacgcaactgccgttggcggcgtatacaagatttgagacgaaattgaagtttggggtaaaagcgggggtgttgagatctatcaaacatagatcggctaaatacccttccttgatctgcccggcttttaaaccgaacataacggctccttccgcagtagcggcttgcagcatctcatttgcggtcaaggcttcgggatcctttcgccaagcttttcctaacagggaagccagcttcatcgcctcgatcatatccaagttattggaagaggaacaaccgtccgttcccaatcccacggtaatacccaattggcgcatttccttgaacttaaaatgcatgccggaagccagtttcatgtttgaggccgggttatgtacgactttcacctcgtgatcggccaacatacgaagctcgtcatcatcgatgtaaattccatgagcgatgatcaaacgtggagaaagcacacctaactcatataaataacgtacgggagtgagtccgaatctatcgagagagtctttcacttccccctctgtctctgccagatgcagatggatagggatttggtgttccatggcgaactgatgcgcccatttcagaagctcaccggaaacggtatagatagcgtgtggcccgatcgagaagcgaacccgtttgctgtagttatccacatcttggatcagtcgttcgttatggcgtttgcatttctccgcctcttctttatcaaaaccatcgaagcaaacgccggctatgatacctcgcaatcccatctcttccgtcacatcggccgtgacacgagggcgttgatacatgtcgaagaaagtggtcgtgccactttttatcatttccaaacacgctaatttcgctccccaatatacatcctcacgggtcattttcgcctcattcggccagatcttttgctcaagccacggcataagcggcatatcatcgccaaagccgcggaacaaagtcatggcagcatgcgtatgagcgttcacgaaaccgggaatgacggctttacggctaccatccagtatcttatcggcaggaaaggacagccccgctcctatttgcttgatctcttttccttcgatatagatatcaatcgttttatcgttaaacaggacattctttattaatatactcatcttcttccttcttatttatataaacggtagaattccgctaccgactcgattcccttgaagaagatatccaactcctgactctcgttgggcgaatggatcgcgttttgctccaagccgaatcccatcagtacggtcttgatacctaatacctgctcaaatgtagagataataggaatgctacctccgcgacgaaccgccaacggcttcttcccaaatgcgatgccaacagccttttctgccgcttgataagccggcaagtcgatcggacaaacatatccttgcccgccatggctgggcgtaactttcactttcacataaggtggagtcacacgagttatatactcctcaaacatttgggagatcttggcatgatcttggtgtggaaccaaacgagtggaaaccttggcataagcctttgaaggcaataccgttttgcttccttcccccgtatatccgccccaaataccacagatatcgaaagaaggccgacaactattacgttctagcgtagaatagcctttctctccgaaaagagagtctaccccgatcgctttcttatatttttcctcgtcgaatgggatttgggcgatcatctcccgttccgcggaagatacatcctccacgtcgtcataaaaacccgggatcgtgatgcgtccatccacgtcggtgatatctgccatcaatttgcaaagtacattgatcggattcgctacggctccgccaaaatgaccggaatgcaaatcgcggttcggtccggttacttctatttcccagtaagccaaaccacgtaagcctgtcgtgagcgacggtgtttcagcgctgaccatgcttgtatcggaaacgaggattacatccgctttcaataattctttatgttcccggcaaaaatcttccaagctaggagaacctatctcctcctctccttcgaaaataaacttcacgttacactgtaacaaaccttctttaatcgctgtctcaaaaccttttacttgaatcatgccctgtcccttatcatcatctgctccacgggcccaaatgcgtccgtcccggatcaccggctcgaaaggttcactcttccacagttctagtggttcggcaggcattacatcgtaatgagcgtaaaccaatacggtcggagcattgggagataccattttctcggcgtatacgacaggattgcctttcgtaggcattacctcggccttatctgcaccggaagacagcagcacctctgtccaacgttgggcacatgtcaacatgtccggcttattctcatgcttggcgctgattgacggaatgcggattaaagagaacaattcttcaagaaaacgatccttattggattcgatataagattttactgacatagcgttttattttatgtttataaattgtagcaaatataacgaaacagatggggattgcaagaagttttatggtattttagccgtgttactgcaataggcgtgcagtaacacggcaaggcggattgcagtatacgagagagtttcatcccatgatccatttagctcgttcacctaatatacggtacatgaaccaagtaaacgcccatgagattatgaaaatcaaaagtgccattatgggtacttgcaaaggtatcggtaaatcaaacttcccgatcaagataaagatcggacctacgacaaagtaatgtacgatatagattccgaaaccatatttggatattttcgatagttttttagctatgagagtattatgaatacgtaccttttgaagaagaataaatacagccgccgtcattaagactacattcggactacagaaggtgaaaaataactccatatccaattctgttgccttgggattcgctgcggccgaactgaatccactataggttatggcataaccaaccacaaacatggctgcacaaatagcgaaggttttccaaatattccaattattaccttgttttaagtaatgtcctaataggagatatccgttgaatcctgcgaaataataaaacatgccgaattgattccacgtcgcttccccgtataaatatttgctgatataggcagacatataaggcaagaaaagagatacgaaccatatccctaaatagaccctctctttggaacgatccgccttctcgatccatgcggagaagaatggcatatacagatacaatccgatgagtaaataaatgtaccacatatggttttccttaaaactgaaattgaacgggatcatggcgatgtctttcaatgcgtcggataaggattgtgactcatttccttgcacatagcagaaaaactcaccgattatctctttcggcaaacctaatagccctgtaacccaagggaatatattgtataatacagaccatatcaaaaaaggaaataataccctatatattctctttttatagaaaacacctaaagattgttcccgtataggcaatagtaaaagtcccgtcatcataacgaaaagaggaacagagggccgtaaaagagagccgtaaacagcggcccaatgtttatattccggtaaacttccgagtgtaggtgagatataaaaaggatctatacaatgtactccgataaccatcagcatagctacggttcgtattacatcgagccacacgatatgtgactgtgttgttgcgttgttcatggatttatgtgttaaatttaaaagatgggtgacaaagatagagcttagtatgagaattttgtttatctttattgttaatttattgtatcaagtattatggtcaaacgaattatcattattggcgctacctccggtatcggctatgaggttgctaagatttattggaaacgaggatatcaactgggattggctggccgtcgggttgatcggttggaggagtttcgtaagcaagatccggagcatatccggataaagcagttggacgtgaccgccgaggatgccgctgatcgtttagacgaattaatccgtgatttaggaggaatggacatcttcctgcttagttcagggatcggcaaccagaataaatacttagatacttccattgaacaagctacgatacagacgaatgtgacgggttttacacgtatggtactagctgcttatcgttatttttccagtcaaggtggtgggcatatatctgtaatcagctctattgccggaaccaaaggattaggtgtcgctccctcctactcggctaccaaacgataccaaaatatttatatagacgctttagcccaactttcccgtatggagaaacagcctattacatttacggatatccgtccgggatttgtccgtacggatttattgaaagacggcaggaattatcctatgctgatgtctccccaatacgccgccttgcgtatcgctaacgctatagaccggaaaaagagaagggcgatcatcgattggagatacgctatccttgtctttttctggagactgatccctgaatggctttgggaatggctgccaatacggaattaggatcgggtatgttagagatttatcttttttgcttctacattagattttctcttgcgccgggagcatgctgaaggactgcgccgactatctggcaactatctaattcatcacaatcgccacatgtattaaagccttttccggatacacatttgcgtatttcacaataatcactgcaatacgcaaatttcactccgtccgcacgacaccccatacagtttatagttgcggctgtaatttcgggcgcattgttcatggcgctccacttttgggcggttttttctcttagctcatcatcattcttaactgtggctatgcgggcatcgcaactttcgcaatctaatccgcaacaggctatcaattgtttcattatttagttgtcagtttattttcttgtttgtttctgtccttgcttttacttttcggcaaacataataaaaattcctacctttgcgcccaattactaattttttaatctatacagatgggtttatttattaagaagcctttagcggatttgatgaccgaggcaaatgattcgggcagtaaatcgctgaagcgtatccttggcccgtggagtttgatcgccttaggtgtcggtgttattatcggtgccggattgttctccattacgggtgcggtggccgccgggtatacggggcctgccattactttatctttcgctatcgccgccttgggctgttgtttcgccgggttatgttacgccgagttcgcatccatgatcccggtggcaggtagcgcatatacctactcgtatgccacgatgggtgagttggtcgcttggattatcggttgggatttggtgctcgagtactgcgtggccgctacgaccgttagcataagttggagtcggtatttggtcgtttttctggaaggattcggagtacatttaccgcaagccttgacagcttgcccttgggatggcggtatcgtgaatatcccggctttcgtgatcgtggtgttaatgagtatcttgttgatacgaggaacggaaggcagttctatctttaatgggatcatcgtattcttgaaagtctccgtagtcttggtgttcgtagtcttgggatggaaatatatccgtatggagaattatacgccttatatccccactaatacagggactctaggcgagttcggattttccggtatcctacgaggggcggctatcgtattctttgctttcctcggtttcgacgctgtaagtacggcagcgcaggaaaccaagaacccgaaacgggatatgccgatcgggatcttgatgtcattggtggtttgtactatattatatatgctgtttgcccacgtgatgaccggagtcgtacattactccgcttttgctggccagaatggaatcgctcctgtggcaatagctatcgatcatatgggacaaatggatgcttctggtgtgattcgtccggattacccttggatgaatcgggcgatcgtaatagctattttactggggtattgctcggttatcatggtaacgttattaggacagagccgtgtattcttgagtatgagccgggatgggctgctccctcccctattttcccatatccatgagaaattccgcacgccggcacgaagtaatttcctgtttatgttattggtcggtacattggctgctttcgttccggcgagcgtagcgggcgagatgtgtagtatcgggactttgttcgcttttacgctagtttgcgccggggtattgattgtccgtaagacaatgccggacgctccccggtctttcaagaccccgttggttccgttcgtgcctatcgccggtatcataacttgtctggtgatgatgctttttctcccggctgatacatggattcgtttggtattatggatgttaatcggtctggatatatatgtctgctatggaatcaaacatagcaaactggaacatatgcagaaacatcgctcgggacagaccacattggatatgatcggtattaccctatccgtgctttgcgtggttacggggctttggcaccagcaaaccgtgggatggggcgagagcaaagtcttattgattatctcattcgtattcgcttttacgcatctagctttctatctttacagactcgggaagcagtttacgagccttacccgttagcgattcagcacgattatgtctcgatggctcacgcgactagtcccgatggtcaacgccattagtggtgaaggcttatgcgagtagtcgcgttgaccttcaccactaatggcgtactataccacttcctttgatacgatttatcggattctagctcttaaaagtaagcctcttattcatcataaaattaacggctccgtaaacgaaaagtccaaggaactgacccaaatattcatttagatcgatcacctccaccattaaaagcaagaatatgaattgagtagcgtaagcgcaaccaaaagcgattaggaataaaggaatctccttccagaaattacctttcccggaagaaaatacccagtatttactccaaaagaagttattcaccaaggcagccacatatccagccatgttcgaccacaagtaattacaatccagaatatccattaatatccagattaccaatgcggtgatcaaagcgttagaagaacctacaatggcgaaacgaagaatacgaacagattccttcatgctgttaattatacgtttcgaatgacaaatatacgggtttatttctatatttgtgctgtacttttgatcaagtatgtaacattcttaaaacaattatgagtatgattagactaaatgtatttattcaagtaagtgaggagaatcgtcccgccgcattggagactgcgaaagaattggttgaaaagtctttgaaagacaatggctgtattgcttatgatattttcgagagcgctacccgtagtgatgtattgatgatttgtgagacgtggaaagacgctgaatccttatcaggtcacgaaaaagcggagcatttcgtaacgttggttcctaaattgcaaggattaggtgcgatgaaacttgagaaatttacattttaagggttttatgtaggatcttattataagcctgagcatgctaaaaaatcatagttatgaatccttcaacttataactatgaatgaaagaaaacataactatgatttttttagtgttatcgctcgttgattgagatatattccctatcgtccaaaacgttcttgtaagccggacggatgatgcgttttccgtcaaagttcaactcctcgatacggtgagcggtccaacccacgattcgggccatggcgaataaaggcgtatagatttcctgtggcaaaccgatcatctcataaacgaatccggaatagaagtccacgttcgaggaaacccttttcttagttcctttatgcttggcgaaacattcgatcgctctttcctctaataactcaaggaaggcgaattcctcagagcgacctttctcttttgccagatcacgagctagttcctttaatacaaccgcacggggatcggaaatcgtatagaccgcatggccgataccataaatcaagcctgtcttgttataagcctctttgttaagcatccgcatgaaataagtatcgatctcgtccacgttcttccaatccgcgatattctctttcaaatgatggaacatatctactacctgaatattggcacctccgtgcaacgggcctttcaatgagccgataccagctgcgatagatgagtacgtatccgttcccgtagaactagtgacgcgtaccgtgaacgtagagttattaccaccaccatgttctgcttgcaataccaagagcaaatccaacgtacgtgcgtccagatccgtgaaatcacgtttcagcatgtgaaggaaattttctgcgatcgataagttctcgtgcggatgacggatgtgtaaagaacgcccctgtgtgctatgacgataaatattgtaggcataagcgataatcgtcgggaacttagagatcaattcaatagattggcgcattaagttatctcgggaggtgtcgtccgggtttgcgtcgaaggtatacatctccaatacgctacgagccaatatattcatgatgttctgtccttccagatccagaatattcatcttggtcttttgctccaagggcatattatcgttcaacagttctttaaaggctgataattcctctttatcggggagtttaccagaaagtaataaataagccacttcctcaaaaccgaaccgtttttccttgatgaaatcatgcgctaaatcctctacgtcgtaacctctatagaataacttaccggggatcgctttaagaccgccctctggcaagcgttcgtatcctactacattaccgacttgggtcaatcctactaacacgccgctaccatcctcgttacgaaggccacgtttcacattatacatcgggaaaagttcgttgtcaatcttgcaagcctctctggcagcctcggacaatttgtaaattaaatattctttcttcaacatgactatactaatttaattgtttcgataatagagatgatacgatcaccaaattctttggtgccgagagatttgccgttcggcataaaacgagccaagtcatgagtggcctctccagcggagaaagcttgctccatagcagatgtaatcaggttagccgcatcactccatcccatatattccagcatcatcacggatgataataataaggaagaggggtttacgagattctttcccgcgatattcggagcggttccatgtgttgcctcgaagatcgcatgaccactgttatagttgatattagcgccgggagcaatgccaatgccacctaccatcgccgctaattgatcggagatataatcgccgttcaggttcaaggtagcgatcacggaatattcttccggaattaatagagtgttttgcaagaaagcatcggctatgacatccttgataatgattttaccggcctttgaagcttccactaaggcggtattggccgcttcctcgccttgctctttcttgatcttctcatattgaggccatgtgaaagtgaaatccgcaaactcccgttccgctaaagcgtatccccatagtttgaaaccaccttccgtgaatttcatgatgttacctttgtgtaccaaagtcacgctcggtaactgatgcaatatcgcgtattcgatagcggcacgcaccagacgctccgtaccttccacagaaaccggcttgatgccgaaagaggaagtttccgggaaacgtattttcttcactcccatttcctcggtgaggaacttcaataacttttgtgcctccggagtcccttgttgccattcgattccggcatagatatcttccgtattctcacggaagatatacatattcactttttgcggctcctttaccggagatacgactcctttaaaccaacgtaccggacggagacaaacatataaatccaacgtctgacggagggccacatttaatgaacggatacctccaccaatcggagttgtcaacggtcccttaataccgacgatgtattcacggaatgcttccatagtctcatcgggaagccaacttccggtttgcttaaacgccttttcaccggctaagacctctttccattcaatggaacgggttccgttgtaagcttgcttgatggcagcgtttactatcttttggctaacgggagtgatctcatgccccacgccatctccttcaatataagggatcgtcacgtgatccggaacgaaaatatgattacctttctttgttatcttactcatgatatcaagatttttttgtttgtcttagtgagctgtatttaaagcggaacccgccttgaaccatttaatttgtaaatcattatacgtatggttaaccgggaatgattcttgcgtaccatccgcatgaagaagaacggccgtcaacggtttgcccggctgaaaatctttcaatccgatgatcgagatatggtcattctcgcggatcttgctgtaatcctccttattggcaaaagtcagtgctaacattccttgtttcttcaagtttgtctcgtggatacgggcgaaactcttggctaggatcacttttacatttaggaagcggggctccatggctgcatgttcccgggaagagccttcaccgtagttttcttccgctacgacgatcgaggaaatactatttgccttgtattgtttcgctacggcagaaactgcttcatattcattgttcagttgattcaatacagagtttgtcttcccgttgaaagcgtttacggctcccatcaacatattatccgatatattttccaaatgcccacggaaacgtaaccatggaccggccatcgagatatgatccgtcgtacatttaccttcagccttgataagaaggggcatatccgtgaaatcctctccattccaaggagcgaaaggctttaatgcttgtaggcggttggattccggatcgatgttcaccactacgttcttacccgtaggtgccagatagccgttatcctttacctcgaaacctttcggcggaaaatccgagcctttcggttctttcagtttcacaaccttaccatcctctgtcttcaaggtatcggtcaaaggattgaaacatagatcacctgcgatggtcaaggccagtgtcagttccggagaagcgacaaaagcatgtgtattcggattaccgtccgcacgtttagcgaagttacgattgaatgaagtaacgatcgaattcttacgggtattatcatccgtatgacgtttccattgtccgatacaaggaccacaggcattcgccataatggttgcgccaatccgttcaaaatcaccgataataccatctctttctgccgtataacggatttgctcggaacccgggttgatgatcaagggtgccgctaccggtattttatcctcataagcttggcgagcaatagatgccgcacggcttagatcttgataagaagagttggtacaggaaccgattaatccgacctccatctttcggggatagccattcgcttttacttttgcggcaaactccgagataggcgtagctgcatccggcgtgaacggaccgttgatatgcggctccaattcggaaaggttaataacgattacacgatcgtaaaacttatctggctcggcacgaacgtccatatccgcttccagatattcaccgatagcttcggcccagctcgctacctcgtcacgtcccgtggcacgaagatattgagccattgtattatcgaatgggaataaggaagtagtcgctcctacctcggcacccatattacagatcgtagcttttccggtcgctgagattgaggcggtgcccggaccgaaatattcgatgatagcgttcgttccaccttttacggttaagatgcccgctagcttaagaatcacgtccttcggcgaggcccaaccattcaaactaccagttaacttaacaccaattagtttcggcatcttcagttcccattccattccggtcatgacatccacggcatcggctcctcctactccgatagcgaccattccaagtcctccggcattcggggtatgtgaatcagttcctaccatcataccgccgggaaacgcataattttccaataccacttgatggataatgcctgctccgggtttccaaaaaccgattccatatttatcggagaccgatttcaagaaatcatagacctcgctattgctcttggtagccgtatcgatatccgttttggctcccatattcgcttggatcaaatggtcgcaatgcacggtagccggtactgcggatttttcttttccggcgttcatgaattgtaaaagcgccatctgagcggtggcatcttgcatagccacacggtcgggacggaaattcacataatcctcacctcttttgaaaaggcgagtcgagctttcatcgtatagatgcgcatataagattttctcggccaaggtcatcgggcgaccaccgatacgttcgcgggctgtgtccactcttctggggaaattcgcatagaaatttctaagcatgtcaatgtcgtacaccatattcatattcgttttttattgtaagccttttcgcaaatatatttatctataaccagctaaaatgtaataaataagacatctgccaatgagtctttgtttttattatcaacaaatatataatataatgaaatacaatttgttcgataatttctatgaggttatagaggttatttataatctcccggataacttagaaaaacgggctaatcgcacgtttattaataaaacgtaccattagcccgttttgttcaagccttggagctgttttttctacttatcgagactttctttccatctttgggcataactatgcaaaatagatgcgataccctttccgatccggacataatcttcccgtttaaggttggctaaagatgcgcggatagaccactcgggagcatcaaaacctcctccgttcagtaaaaccaaggaagtttcctgtgccagacggaaaacgacatccagaggttcgtaattcttttttagatattccacgaaatcatccccatagaatttcttagcccagacaagcatatcgatctcactataatatcccgcacgcaaagggtcgtctaataaggtgaatccggtgctttcccacaatgtgtgtaaacgctcgtggatcatatcctgcatccttttcttataggtattttccgcatctaatagagcgaaagacgcaaacagagacatttgtgtttgttgtggcaaggaaagaccggccgtatgattcaaggctacttgacggctatcggctaccatacgatcaataaagcggatatcctcgggatgtaaggatagactgctatatcgtttttttagaagctcctgtttatctcttggcaattcacggatcatccggtcgtaaatattatcttgatgtaaagcgattaccgccaatctccatccggttgccccgaaatatttggagaaagaatagacacataacgtattctttggtaattcggccatcatcgagcgaaaatgcggaataaatgtcgcatacacatcatccgtaataatcataaggttgggattgtcgttccgtacgatctcaacgatcctattcatcaatgcttttgtcaatccgtatgaaggcgggttgctcgggtttgttataaaagcggctttcacgctaggatctttcaggacatctaaatccttttcttgatattgccacgtgtgatagccgtcttttgtcatcttcaaggcttttatctctatgacattaaaaagataacgagcctgttccggaatctctatataaggagtgaataccggagcgaagagaatgatcttgtctcccttattcaacaagaaattctgctgcaaggaatcgaagatataacacatggcggcagttccgccctcggtagcgaaaaggtcgaatattccctcagggggctggttatcacataattcttggtctaaataatcccgcacgagcatttccgtatatttcaagatacgatcgggaaccggatattgatcaccaatgacaccttccgcccattcgtatacaagctcattctcatctacacctttttccgtgaccagatattcataggtacccttcaataaagtagcgccgggagattgcgcatgtttctttagaaactgtacgaagcgagacgcgatccttttgcggttgggaacccctgcggctccggccatctcatctgccaattcggtttcccgctggcattcctccaaggcgaactgccctaataggaagaatgcctcccgtggaaccgtactgatccagtttggatttccccttcctgcgttcagcatgatgtgcgtacttttacgagcgctctcatccgctaactctatcaagatgttctttagctcgaaagggctaatctccgacatctttttctcatattctctcgtgacatgtattttcttcttgtccatacattatatatattacatgattagcacaataacgacaccccagatgattaataaagtattacccaccgcataggtaacggtatagcctaaggctggagtctcacttcctacggcatcttccaccgctcctaacgcggcggttgtcgtacgtgaacccgccgtacaacctaaagtaatagccgggtggaacttaaaaacgtaacgtcccatcagaataccgatgataagcgggatagatgtcgctaaagcaccgataataaataaacttataccgacttccttcaatccggtcacgaaactgggacccgccgtgataccgactacggcgataaacatattcagtcccaaattatttaatatccagacggaaggctccggaatacgcccgaaggtcggatgcttggaacgaagccatccaaagacgagtccggctatcaaagcgccgccactcgtactcaggctgatcgggacacctccgaaatgaatcgcgagcgaacctaaaattccccctaagaaaataccgatacccacgaaaatcaaatcggtctgattggttgggcgatcgggatatcctaaagtcgtagccgctttatttacctctgatttcatacccaccaattccaacatatcaccggaatctatcaccgtagcggccaagaccgggatattgatacccgcacgccttatggacttgacgctaacaccgtgcatgaacgattgattgcgtaaatagcagatctttttccccacgtattccttatggatcactagtacgggtaacgtctctgccggaaaatcgagcaattcaatgtcattgacctcgtcgccaatccagttctcctctccgatcacgaattcccggcgaccgcttaggacaacctcatttccggtatgtaaaaccaaatccggtttaacatcggttactacattattaatacggacacgctccacgaacaaatgccgtcccaattggtctaaatatacctccaactgctttacgcttttgccatccttgaaccattcattactaatcttataggcccggaaagttaccggacgggcggcaggcataaagcccggttgctcgctctcgtcgttatttcccattttagcctctagctctttacaggcttttttcacgtagtcgagtcctcctaaaagacgtggcccgatatcactcaccaaccatgcggatcctgccgtaccaaaaatataagttaccgcataggccacgggcatcacgttgaccatagcgcttttatccgtatcgctaatattcatctgtccgatcgtatcttcggcaactcctaatactgccgacatcgtctgggagcccgccaataatcctgcggcctcgcctgcgttatatcccataagtttcgccagtaaaaaaggagcgatcaagcaaaacacacacatgacggcggcgaaaagcatttgaggaagaccttcctttttcaatccccggaagaactgtggcccaacactatatcctacagcgaagaggaacatcaagaaaaagacggactttaacggtccgcttatatcgatttttaattgcccgatcaatacaccgaccaataatacgctggtaaccgttcccagcgtgaacttctttatcttaaacttgccaatccagaaaccgagagctaaggttatgaaaatagctagctccggataatgttgaagtaaattagttatccattccatatctatttatttgatgttaaacaaaaaagatgctattgaaacagggattctttgaaagatgttgttacttttcgggattatttatataaatttgcgaccgcttaggtgatagagtttgtctaccgacaattctataaaagggaatccggttagaatccggaacagtgcccgctactgtgaagctcttgaaaaggaaagcgttctgctatgccactgtcttaagaaagatgggaaggttgctttccgagccagtcaggaaacctgccaagcgaagtaatgattaattcctcccggggttaggagtaattaagaggatagaaatatcacctatatctaaaagatgttggagacggaataatacgttgtctccgtgggattgatatgtaatctaattattaatatattcatatgatgaggaaacacttactatctttcttcctgctggtcatcagcctagtttgtcgtgcgcacgatggcgagaattttgtagcatccgatttattcgcctctttacaaccgggcgataaggccgctttattgatggtacattttggaacaacccatgatgatacccgtgccttgacaatcgacgcgatcaatcaaaaagcgaaagaagctttcaaagatgttgagttgcgtgaggcatggacttctcgcattgtaatgcgccgcttaaaagctcgtggcgtagagaaactgaacccgatcgaggccttggaaaaattaaagactgatggttatacacatgtcttgatccaatccacgaatataatcgaaggtatcgagatggaatccttacgtaaggatgttgccaccatgaaatcttctttcaaggagattcgtatcggtaatcctttattgtatacaccggaggattatgaggcggtaatcgccgctatcataaaaaatggggcgaaagaaggcgctactttattggtaggccatggcacttatacaccggcgacggcccaatatgctatgttggattatatgttgaaggagaagggattcaaggattattccgtaggaaccatcgagggctatcctacttttgatacgatggtagcccaagtaaaggccaatggaacgaagaaagtcttgttgatgccatttatgtttgttgccggagaccatgcgaaaaacgatatcgccggtgattggaaagaggaattggaaaagaaaggctacgaggtaagcgtatttatggaaggtctgggacagaatccggatatccagaagatcttcatcgaacatgcccgtttcatggctaaacataagatgatcgatatcgttgataagaagaaagcttatgcggtagagaaggactaaaaaagttcactacacaatgttttttattcctttcggaagaaaaagtaattccttccgaaagaaactaaattttcattcgaaggaaaatggaatttctttcgaaagggatttcacatgcatacaataaacagttataatgctaaatatatgaaaagagttttgacaatcttaccgttgacagccttatgtatcagtacgatgcaggcacaacacaagaatgagtacacgaatttcgccgatacgacattcaatattcaagaagttgtagcgaccgccgcacgcaagccacgtccacaaatcacgaagttggacgtacctatgaaatatcttcctatttcaattaatagcattacggcgagtagtttggagttgcgaggtatccgtaatatccaagatgcggtacgctttatgccgggcgtacgattccagacatcttatggcgcatttcaacaattgtcgatccgtggtttcgatcattctatcatgatgatagacggtatccgcgatgaacgttcggcaataaacaactcttatcccgtacccgatctatcctgtatcgagtctattgaattattaaagggaccggcttctgtactttacggacattcagccgtaggtggaaccttgaatatcgttcgtaaatccccgtcagagaaacagagcgttaatgcccgattggcctacggtagttacgagaataaagaggcgacacttggcatgggcggtaaattggtcggtccggtcaattattacgccaatgtcaacttttccgatcaagagggctggcgtgataatggcaaccgtcgcttttccggttatctggcattgcaagctaaaatgacggaacgtgacatattagatgttcgtggaggttttaaccgcgacttctatgggacggagatcggtcttcccgatttaatggcaaatgatgtatataatgtgcaaacaggacagttatatctccataaaaatgatatgctaccgggacttgaccgtgaggctcgttacaataacgagtccgactttatgaagaatcatgcttggaacatatcgacgcagtatacacatactttttggaacggcgcaaaactaacagatcgcctttcttacaataacgacgatatcaactattttgggacggaagccctcgactatctcgaaagtgatgatccgatctatgatcattattatatgaaaaacggccagaaaaaatatatctgtttggacagtgtatatctttctttcccgcttcgcttctcccatatagccaagacggtagccaatacgctcgagctaagcggtaaattcaggacgggtgagataaagcatacgtatatgggaggttactctttcgtcgccttgaatcgtaccagctattcgggctataatttaggggatgatgttcagggtcccggcctttattcgcatgtatccgtttatgatccgcatagcatgggatatatgaccagtaaattctcgaaagcgacggttacgcatcattattccaacagcctttatcttcaagatatggttgagttcaacgagcaatggaaggtattagccgctctacgttacgactttttccgttatatgtccgccagcgctacaactcctaccggacgacgtgagtatgaggagcattcaagcttcaatatgataaagaataaggcgttgacttatcgtttcggagcggtctatctgccccatccgaatacatccatttatgcgtctttcgcctctttcttcaagccgatccgtacgttctatcaagataacgtcatttatgtaggaggtgatggaaatcgtttcgagcctgctcgcaatgaggaagtatttaagccggagaaaggataccaagccgaggtggggcttaaatatcaattgaacaatatattaagcgccaatgccagcttgttctatatccggaagatgaacagtacggctacgttgaccaacaactatcaagtggaggtaaacggcgagactaccacgatgagcgtaatcggacaggtgggtgtacaagattccaagggttttgattttgatgtcactctttctccggtaagcaccttagcgctgacgatcggttatggattgaacgactccaagatccgggagatgaaagaaataaaggatccggaattgatcgaggctatctatggcaataacccggatgagacaaagcaacaattgaatagccaagaaggaaactggcagagcaacgtaccgaaccagactttctacgcatacggcagttataccatccctcggggtgtcttgaagaatctggaatttcacttgagtagcagttataccggtaaagtataccgtaatacatctaacaactcttggttcgatccgtattgggtaaccgatttcggtatgtcttatttgttgaacaacaatattcaccttacattcaacttgaataacttgtttgacaacaattattataaccaagcgctcggacaacagatggtgccaagcatgcctcgtaatttccaagtggctatctcctatacattataatatatagaacatacgctcatgaatctattgacaaagatcacgctatttatacacaggatactgggcacggcgttcagtatcctgtttctcgtttggttcctatcgggattggtaatgatctaccatacgttcccgcgagcggaccgggccgataaacgggcgaagatggatattctctctctggagaatcttccttcgttagaccagatagagaaacgtttaccgcagaacgagcggataagccatgttaccttaaacagctatttgggacaaactgtttttcatatccggacggagaaagggagctatgatattcctgccgactcgacggaaagattacccgtaatcgactggaatcgtatccaacgtgtggcatcacaatggaatacctcttccatagcgaaggtagattccttgtacaccttggaccaatggattccattcggtcgtttaaaagaggaatttccgatctataaattccatttcgccgatccggaacgacatgaattatacatatcctctaaatccggggaggttttgcaatatacggataaaaacagtcgtttctgggcttggctcggggcgatccctcattgggtttatttcacttccttgcggcaagacgctgaattatggataaaggtagttgtctggttatccggcattggatgcgttatgtgtatcgctgggatctatttaggaatacgggatttccggttagcgaggagacgtcatttgatttccccttataagaagttctggtataaatggcatcatattcttggggtgttattcggtttattcgtcctcaccttctgctttagtggtatgatgtctttggctcgtgtacaggattgggggttgaaagccaagctcgatacaaacccggttcaagaactgcggaagatggctccttccccactcgattatccgttggattacagggcggtcgtacaagcctatcccggccagatccgtcaattggaatggagtagttttggtgatatacccttttacatcgtacaaacagacacgaaggatattgtcgtgaacgcgaataagagcgacaggatatctttattgaacctgcgaccggaagaaatccgttccgtattgtctcagatacatggtatcgggaccacggctgatatcaagctgttggatacgtatgatacatattatatctcacgaaaaaggaatttagaactcccggtctggaaagtatccattcaagacgtggacaatagttgttattacattaatccccgtaatggacaataccgttatgtaaataccccgtctcgttggaaccattggatgtatccggcattgcatagcttgaatctgaaattcttggtagatcatccggtcttatggaatatcgtgatgtggggaaccatgttgggaggcacgttcgtttccttatccggtgtatggcttgcgataaaatatatcaggcgaaaagcgagaagaaagaagtaaagcctgtatatttgtattatatttattgagaacattgtattataaaatagatttgaatgaataaaggcaagattatagtcgccggaatcggccccggtagcgaggccgatataacgcctgcggttttggccgctatccaaagttcggatgtcatcataggatataaatattatttctgttttatcacccacttgcttcgtgagggaacggaatgtatagatacaggtatgaaacgtgagcaagctcgtgccgagcaagctttcgcttatgcgaacgagggaaagacggtttgtgtgattagttccggtgacgccggcatttatggtatgactcctctgatttatgagatgaagaaagaatccggaagcgagatcgagatcgagtcgtatccgggcatcagcgctttccagaaagctgcgtccttgcttggcgctcctatcggacatgatttctgtgtgatttccctctcagacttgatgactccttgggaacggatcgagaaacggattcgtgcggcggccatggccgattttgttacggcgatctataatccgaaaagcgagggacgttattggcaactctatcgcttaaaagaattgttcctgcaagaacgcaagccggagactccggtcggttatgtacgtcaggccggacgggaggagcaagaagtattcgtcactacgctcgcagatctggaccccgagcagatcgatatgttcacggtagtcttgatcggaaactcacaaacatatctttccgggaatcatatgatcactccccggggatattatggcgaggtcaaacagaagaaaacggatacgggcattggacaggacatcatgatccgtagtttccgtacgatcgagaaggaattgaaaaaccaagagatcccgttggataagaaatgggcgttactccatgccattcatacgacggccgatttcgatatggaaaatatcctttataccgacccggatgctgtctctacattatataataagatcagcggcggggaagttcctacgatcatcaccgatgtcacgatggctgcttcaggcattcgtaagggagctttgcgacgtttgggtgtcgaggtgaaatgctaccttcaagacgagcgggtcgctgagatggcttcgagcaaaggaattacccgtacccaagccggtattcgctgggccgtggaagagcatccgaccgccctgtttgtcttcgggaacgctccgaccgcccttatggaattatgcgatttaatacgtaaaggtaaagcgactccggcaggtattatcgcggctccggtaggttttgtacatgtgcaggaatccaaacatatggtgaaaccttttatcagtataccgaaactaatcgtggaaggtcgtaaaggaggtagtaatttagcggctacgctagtgaatgccattctttgttttaatgacgcaaaacaactaaagccgggaagagacgtatgaaccgattttatgtcatagggctggatgataacatgaaacaatactttccgccggaggtattggagataatctcgtcccaccgggtgttctctggaggcgtgcggcatcatgagatcgtacgttctttattgccagaaaaagcggactggattgatatcaaagtcccgttggacgaggtcttcgatcgatatcgttcgcatgacggtcgggaaagcatcgttgtattcgcttccggagatcctttgtttttcggattcgccgttacgattcaaaaccgattgccggatgcgcaaatccgcctgtacccgtcatttaattccttgcaactcttggcgcaaaatctattgatgccttaccacgacatgcggatcgtctcccttaccggaaggccttggcacgagttcgatcgtgccttgatcgaaagtgcgtctaagataggcgtgctcacggatcgggaacatacgcctacgaccatcgcccgccggatgctggaatacggctacgataattataccatgtttgtgggagaacggttaggaaataccgaacggcagagcatccgccaattcagtatacaagccgcggcaatgaataatttcgttcatccgaattgcttgattctccggaaagagcgtgacgggcattcccgtaagttcggcctgccggattccgcgttcgagcatttgaacggacgggagaagatgataaccaaaatgccgatccgtttgttatctttaagcatgctggatctgagaaaccgggaacgtttttgggatatcggcttttgcacgggttctgtctcgatagaggctaaattgctgttcccgcatttgcatatcacgagttttgagatccgggaagaaggacgaaagttaatgactgagaattgtcgtcgttttgggactccgggtatcgaggctataatcggagatttcttatcggtggatttatcagcgttggaggctccggatgcaatctttatcggcggacatggcgggaaattagtggagatccttatggtagtttccaaaaagatgaaagagaacggtgtcatcgtcttcaactccgtatccgacgaaagcaaagcgcttttagaggaagcggttcgccaaaccggtcttcggatatccgcccaaacccgtatcacgattgatgattttaatacgattaccgtgaatgttatttataaattatgagtacaatatcaattattccaatatccgatagcagccgggggcttgctgagcgaattcttgcttcttatcccgaggcgaagatcttaccattcggctctttctcaaaagaggtttttcacgaatccagtagtttggtatttattggagcgatgggaatttgcgtacgcagtatcgctccctttgcggaagataaacataccgatccggccgtggtttgtatagatagtaccggcaaatacgtgattcctgtcttatccggacatatcggtggagcgaacgatctttccaaagagttagcgaacctattaggagccgaagcgattattacgacacaaagcgacaacgcaaacctatgggcgctcgatacattagggaagaaatacgattggaccttgatcgccaaagatagcaatgccgccatctccacttttgtcaatggaaaaccgacagcgctactccttgatatacgagataaaggaacggattatttggagcgtacggtcccgtctcatgtctctatcttttattccttcgaggcgataccgcagcaagactatgagttattgatgatcgtcagtccccaacaatacgatacatccatccctacgatcacctatataccgaaagtcctccacctaggaatgggttgccgcaaggatatgcaaggcgatcctacggtcgtttacgaacatattaaagatgtattgcgtgataaacgcctatatccggaagctttggcggatgtaaatacaatcgatttgaagaaatgcgaaccggtgctgacattactggcttatggagttatggaatgccctttccacacctatacatcggaggagctgaaagatatcccggtacccaatccctcggagaaggtactggaggtaaccgaatccccaagtgtatcggaagcttccgccatttatgcggctcatggcggtccgcttttggtcgagaagcaaaaagcggatttagggaaaggaaatgaatatacctttgccgtagcgttagatcgggcggcctgccgcaagggacatatcgagatcgtaggagccggtcccggcgatccggacttgatctctatccgcggacggcaaatgttggagaaagcggatttgatcctgtatgcaggaagcctcgtcccgaaagaacttaccttatgcgcgaaggcaggcgctacggtgcgaagctcggcggatatgaatctggaagaacagtttgcgttgatgaaagagttttatgataaaggattgtttgtcgttcgtttgcacacgggcgatccttgcatctatggagctattcaagagcaaatgaattactttgatcaatacgggatggattatcatatcactccgggtatttcctctttccaagccgccgccgccgctctttattcccagttcacgattccggagaaagtacaaacgatcatcctcactcgtggcgaaggacgtacgcccatgcctgagaaagagcaactgcacaaactggctcaaagccaaagtacgatgtgtatcttcttaagcgccggtgtcgtagagaaggtccaagaggaattatcgcgacattacgctccaaccactccggtagccgcttgctataaattgacatggaaagacgagcggatctaccgtgggcaactgaaagatcttgcgaaaatcgtaaaagagaatcatcttacactgacaacattacttgtcgtcggggatgccatcgataatcgcaagggtctatcccgcttatatgcggatgaattcaaacatcttttccgtaagtaatgatactgatccttggaggaacgacagaaggccgtgtggctgtgcgggtagcggacgaggcagccgctacctattactattctacgaaaggaactttgcaatccattgaatgcgcgcatggaatccgtttgaccggagccatgaatgcggaggaaatggagtgtttttgtcgtgaccacgcgattaagctattgattgatgcggcacaccctttcgctcaagtgttacaccaaacgatcgaaaaagtatcgaaatgtttacagattccggtgatccgttacgaacgtcggtatccacctcgtgatgaggacttgatttggtgcgatagttatgcagacgcaattcaccaaatggaaaacaaaggtatccaacggctacttgccctcagtggcgtgaacacccttgccccgctccgcccttattggcgatcgcataccacttggttccgtatattggagcgggaggaatctttgtcgttggccgagaagcagggcttcccccaagaacgtctggttttctatcgagaaggtgaggatgagttaaagttgttggagcaactccatccggatgcgatcttgacaaaggaaagtggtttctccggctattttacggataaagtgaacgctgcccgccaattcggaataccagtatttgtcgtgaagcgtcccgcattaccggaaactttctaccgagtgtatggtgaagacggattgcgcaaacaaatcgaacgcctattacccgaattctttcccttgaaaagcggatatacgaccggagcttgtgctaccgccgccgcaaaagccgctttattggccttattatcaaggaaggaacaaacagtaagccagataacattaccctcgggagaacagataacgttgccggtagcctataccgaatgggccgggtgttccgccacctgtaccgtgatcaaggagtctggggatgatccggacgtgacgaatcatagccggatccgggttactgttcaattatctctcgatgcatccggttgtgccatcgccgtggcagagtcgtgccacggtgatggcacagctgtgccaagccgatggcacaagcgtgccacggtaatggcacaagaagaatattgtcaagaaacagaaagcgacgatacgggaagagtcatcttccaagcaggtgaaggagtcggaaccgtgacccttccgggactcggcttgaaagtcggcggcccggctataaacgccacgccccgtaagatgatccggcaagagctgattccactcctgccctcacccgattccgtcgctattgtcacggtctcggttcccggtggcgaggagttggcgaaacgtaccttcaatccgaaacttggaattatcgggggaatctccattatcgggacatccggaatcgtgcgtcctttctcatcggacgcttttatcgcctcgatacggaaagaagccagtgtcgccaaagcgataggttgcgagacgttggttattaattccggggcgaagagtgaacgctaccttcggagcttatacgcttctttgcctccacaatcattcgtccattacgggaactttatcggagagacgctaaagatcgctgccgatttaggtttcaagcaggttatcttaggcatcatgatcggcaaggcggtgaaacttgcggaaggtttcctggatacacacagcaaaaaagtcgtcatgaacaaaggcttccttcaagatgtagcgaaagaagcgaaatgcgaggaggcgaccgtagatgcaatcaatcggattacgttggcccgtgaattatgggagcttcttacggaaaaagatcaaaatcgtttcttcccattacttttacaaaaatgtaaatcgtattgcgctcctatccttcccgacggcgaactaaccttgctgttaatatccgaagagggcaaggtcttataccaatcttagctttagagacgcagcacgcacgctacgtctctacaccccccagactgtaatagcatttctttttagctgtttattcttttttattagggattctttaagaatacatattaggaggatttcgtacttttgccctctaaatattgattaaaataatgtttagatatcttttaatttatatggcctgctttctattcgccttttccgtaaaggcgcaaggtatttccaatgacacgattccgaaagaagtgctgatgctggacggtaagcctatgaccgaaaagcaaatacaacgttatcataaacaattacataaagactccatacgggccaacaaaaggatctggtggtctatccttggcggaccgtcttacacgccggaagcctcctttggcgtaggtggcgcggttttggctagctttcgcttaaacaagaatgatacgatatcccaacgatcgtttatccctgcgggatttaacatcaccttaaacgggacgttcgtttttgccggtgctggtaccttattcttcaacgagaatcgcttccgtatttatatcagttacggttatcggaacgaaccttcgcattatttcgggaaaggctatgagacgatcgagcaaatcgagaagagcgactcgacaacgaaattccataagagttctttccaactatatccccgtttcgtatgggaagttaggcctcatttatatacgggtcctctttttgatattaatttcagcaaatcagatgatatcaacccggtgatggccgaagatccttatttcaataagttcaaacgagattatgtcaatatcggtgtcggcggcttgattcaatacgatacacgaaatgatgtggcgaccccaagttccggtatgttactaagcgcgatcgccaaggtgtacggaaagtatttaggcggtgcatataattatgagatgttcgaactggaataccgccaattccagcaagtatttcgtcctcgtagcaccttggcatggatcgccaagacacaaatcggtgtggggaacgttccttttacggagcttccttcatttggttcccctttcgatcttcgcggatattattgggggaagtaccgtgacaagaccatggcgtatgggattctggagtatcgtcatatgttcggtagcgtggagaaatataagagcggtaatttctgggcgaagtgtggttttgtaggttgggttggcacgggtacgatcggaaacgctcctatcgtagactggaataagtggaaattcaactacggcgtaggcctacgtatccaaatgcaacccggcaagaacttccgcctagacgtaggcaaagacccgaaccaaaaagggatggcggtttatatgaatatgacggaagccttctaaaaccagaaggctcccgtctacgatctatggaagtataaccttgcgttaaaattatcgtttaaaagccggaaatatcttaatatcgatttttttcactaagtttgcgtcatcgaaggggtgccatactatatgggctgagatcatacccttactacttgatgcgggtaatgccgccgtaagaaaaacgaatgttaaatggataaaaatgaaacgtaccgttatccggtagctttaacgatcgctggctctgatagtggcggtggtgccggaatacaagcggatattaagactttttcctcgctgggtgtttttggagcctcggcgataacggctataaccgctcaaaacacacagggggtgcgagggatccaagcgatctctcccgagattttgagaggacaaatcgaagctattcttgaggacttcatcgtagatgccataaaaatagggatgctacataacaaggatgccgtaaaggttgtatctgagactttaccttccttccgacgaacttctatcattttagatccggtgatgatatccacgagcggaagtaaattattggaggatgacgccatccgaaccatcatggatgagttgttccctaaagcgacactgcttactccgaatattcccgagacggaatatctttccggtataaaaatcaataacgaggcggatatcttatgtgccgcccggaaattgcaggaaaaaggatgtaacgctatattgatcaaaggggggcatattcccggagtagaaacggtggatcggttatttatcaatgagaataatccgatttgtctggcctcgccaacagtggagaccttcaatacccatggaacgggctgtacgctatcgtccgccatcgccgcttatatggcactcggccattcattggtggaagccgtacgattagccaaggaatatatgaataacgcgctcgttcacggggcaaatgtatgcatgggaaaagggcacggacctgtaaaccacttcttctcaccctctgcccttcataaaatccgatggaatcatgaataagctggtcgtaattactacaccttattttttcgcggatgaagcttctttgatcgaacttctattcgcggaaggaatgtctcgtttacatctacgtaaaccggattgtaaacgtgatgaattggagggcttattggataacatctctccggcttattacgacaggatcgttcttcatgattggtttaccttggcagaagaaagggctttaggaggaatccatttgaacaagaggaacccggaagctccacctttatataaaggtagtataagtcgttcttgccatagtctggaagagattatcgagtataaaccggtatgcgactatgtgttccttagcccgatctttcagagtatatccaaagaaggatatggtagcggattctccttagatggattgcgaaacgcgaagggcatcatcgatgataaggtgattgccttgggaggaatctgcccgcggacaataacgaaattaaaagatatccccttcggcggtgtcgccgttctcggggccctttggggaaacgatccctcccttcttgttgcggatcaactcataaaacaattcaaacgattacaagtatggccttaaattattatttcggatatgatgagaatggaagagtcggtcggagaacaaccggattacgccccccttttggtggaaacaatcgcttgatgtttataacgcatcgtacgcctaaatatacggaatgcgacgaggtaagcatggcaatccaaggagggtgctcatggatacagttgcgcatgaaggatgggatttatgaggataccgtacgtacatgtgccactatctgcgcggaagaatgtgagcgaatcgtggatttctgcgtaaacgatgatctggaggctgccgtgacatgtggcgctacggcttgtcatctgggtaagaatgatatgcccttggatatcgcttgggaagtactgagagacaagttagattccaatgccatcttctatatcggggctacggcgaatacttttgaggatatccggctggccgtagaacgaggcgcctcgtatatcggactagggccgtatcgctttacgggtaccaagaagaatttgagtcccatcttaggcttggatggttatcgtaaaataatcgctcaatgcaaggaggctggcatcgatattcctatctttgcgataggtggtattacgctggaagacgtaggccctttgatggagacgggtataaccggaatcgctgtttcgggcgcgattatcaatgcccccgatcccgtggaggaaacccgccggtttatagaggaaatcaataagtactaaactaaatacatatggctactaaaaagaatatgcgtatttcctatccgtcctcggaaaagatttatgtcccgggcgagatcaataagatcaaggttggtatgcgtaagattaaattgttggacacggtaaccttggatgagcatggagaacgaatcttcaagaagaacaatccggtaatcgtttacgatacgagcggcccgtattccgaccccaagatatcgattgatatcgctaaaggacttcctcgtatacgtgaggagtggtacggtaagcgtaaggatgtggttcaattgccggaattgacttccgcttatggtcgtgagcgattggcggacgcgactctggattccctgcgtttccccaagcgatacttgcctttccgggctaaagagggtaagaatatcacccagatgtattatgcgaagaagcgtattatcactccggaaatggagtacgtggcgattcgtgagaaccagcaaatcgaggctttgggactgaagtcgtatatcacgccggagttcgtccgcaaggaaatcgccgccggtcgcgcgatcatcccggcgaatatcaatcacccggaagccgagccgatgattatcggtaagaagttcttggtaaagatcaataccaatatcggtaactccgctctttcctccggtatcgacgaggagatcgagaaggcgatatggagttgtaaatggggcggcgacacgttgatggatctctctaccggcgatcatatccatgagacgcgcgagtggattatccgtaactgcccggttccgatgggtacggttcctatttatcaagccttggagaaggtgaatggtaaggtagaggatctttcttgggagatctatcgggatacgttggtcgagcaggcggaacagggcgtggattatttcacgatccacgcgggtttgttgcgcaagcatgtggagctgacggcgactcgcctgacggggatcgtatccagaggcggatcgatcatggccaaatggatgcagcttcatgacgaggaaaacttcctgtacacgcatttcgccgagatctgcgagatactgaaggcatacgacgtggcggtctctatcggagacgggcttcgtcccggttctatctatgacgcgaacgacgcagcacaattcgccgagcttcacacgatgggagaactgacgaaaatagcttgggagcagttcgtacaagtgattatcgaaggcccgggccatgttcccatgaataagattcatgagaatatgaaggaacaacagtatgcctgtcatggagcgccgttctatacgctgggcccgttgacgaccgatatcgctcctggatacgatcatatcacgtcggctatcggtggcgcgcaaattgcttggcatgggacggccatgatctgctacgttacgccgaaggagcatttgggattgccgaataaggaagacgtgcgtaatggggtggtcgcttataagatagcggcgcatgccgctgacttggcgaaagggcatcccggcgctcaagtacgtgataacgcgttgagcaaggcacgttttgatttccgctggaaagaccagttcaatttgtccttggacccggaaagggctttacagtattataaggagagtgctgttacggatggagagtactgtacgatgtgcggtcctaatttctgcgctatgcggttaagtaaggatttgcaaggttgtaaataaaatactgttttgaggggatgagacggggcatgccccgtctctacaattgagtgatttgttttccgcattcgtagccttcctcatatagttcttccagtttctttgtgtcgcttccggtacgaccgactttaatcgggctttgcggacggatgacgaaggcttttccttcggcctccagttggtctatgtaatccaagacctcgttgtaccgccggtatcgtagtcgcaactgttcccggatcgccgggtatttgttataaataaagccgggaaggtaaaaatctttctcttctttccgatagcctttgttacgggtaaggatgatgacgttcttggagaagccgtcggcgatagcccgtcggatagggatggcatcgcatacgcctccgtcgaccatcggtatcccgtctacatacgtaattggacagaggatcggtaaggtgcaagatgctttacagatatccaccaaacgtttcttatctttcttctcctcgaaatattccgctttacccgtcaagcaattgctcgtgaccataacgaaccgatcattggacttgaaataggtatcgtaatccaacggataatacaaatccggatagacataaaacaagaaattcagatcgatatatccccttccccgtaagaaatgacgaagacctatgtaattatatttcttcaataggtcgatattgctaaaacgagagcgtccccgctggcgggaagcatacgagattccgttactcgcgcccgccgatactccgatcgtataaggaaaccaaatatcatgatccataaaataatccaatactcccaccgtaaatatggcacgcattccgccaccttccaacaccaaacctgtctgactatctatttccatatatatacctctgaattaaaaaagccattgctgggttcccaccaagcaatggccacaaaaatataataaatcagcgataaataatagttcctttttagaatttacttggtcacttcgttcactaagggacggccttcctcgaaatccttgatgttccgcaaggtagtctcggcgatattatgcagagcctctttcgtgaaaaacgcctgatgggaagtaacgatcacattgttgaacgagagcagacgggccaagacatcatcatcgataatcttatccgatttatcctcgtagaaatagtctccctcctcctcgtagacatccaatccagcggcagatactttcttggtcttcaatccctcgatcaaggcgttggtatggatcagtaacccgcgtcccgtattgataatcattacgccgtctttcatcttggcgatcgaatcgtcgttgatcagataacgagtctggtcagtcaacgggcaatgcaaggaaatgatatcggactctttgtataactcgtctaaagagacataggtgatcccttcctccttggcgaatttctcatccggatacaggtcgtttgccaatacacgcatccccaatccttttaagatatgaatcaatatcttggcgatctttccggtaccgataataccggcggtcttgccatgcatatcaaatcccatcaagccattcaaggagaagttgccatctctcgtacgccagtatgcccggtgtatcttacggtttaacgataacatcaaggccaacgtatattcagcgaccgcatagggtgagtaggccggcacgcgtacgaccggtaatttccctctggcggcattcaaatccacattattaaaaccggcgcaacgaagcgccaacagtttcacgccattggcaaccaaagcgtctattacggcggcatcagccgtgtcgttcacgaaaatacatacagcgtctaccccttgggttaagacgacattattgatattcaaatgtcctttatagtaacgaatatcgaactcataccgctcattgatcttatcgaaagaagcgatgtcgtagggtttagcaccaaaaaacgcaatcttatacgccatataactttagttttttaatataactaaattaagcccttgattgtttatcgaaaaagaaatccattcgtttaattatagtacttttgtccgctgggtaacaatatagatgagcatgaatcaatcccataaaagatcttttatagcagttcttatttttattggctttctcttgtttatggcattttggggcatcgacctgatcttaggggcgtatgcgggacataaattgagtaaacttgccgaaaggcatcatcttgacatacgctatgataagatccggttgatagggctgagtaccgtacgtatggagggattgaccgttatcccgattgatgctgatacgttgatacatgcggacaggcttcaagcgaaactggagcttggcagattattgctacttacccctgccatagagagtgtacaagcggataatttgcatattcattttattaagaagggagagagagctaattttgatttcctttataaaccatcgaatcacctaggtgagccagaggaaacagctgtagatgataaggaacaggattacgcacgcaaggctgaacgctcccttagtctccttttcaatttattgcccggaaatgccttggtacatgatttatgtgtttcttatagtaataaaggagatgaactaatactagagatacccgaactcaatcttactaacaatcaattctctacgcatataaatagcacggagaacggagttcgtagcgaatggatttgcgaaggctctctctctgataaggagcgactcgtgaaagcccgtctctacgccgacgagcatacgaagattcctcttccttttctggaatatcgttggggggcatcggtacgtttcgacaccttggccttcgagcttaagggacctaaaatagaggaagacatacaatccttactcggaagcgcctatgtgagcgggcttaccatccaccaagagcgtatatctccggacacggtcttactggataaaggctctatacacttccggacaaacatcggtaagaactatatcgaattagatagcgtcagtgatatccggtttaatcatctggatttccatccttatctgaagatcgttaaagataccagttggcaaatcacggcctctgtgaataaaagagatttccctgcggatcaactgttctcctccctgcctaaaggcttattctacaatctggaaagcctgagaacagaaggtaccctctcctatcatttccgattggatttggatttcggacaggtagacagcttgatcttggagtctaccttgaaagcgaaggacttccagatccttgcctatgggaatacggatttgcggaagatgaatgagccatttgaatatactgtctatgagcaaggcgagccggtacgctctttcgagatcggtccggcgaatccctctttccgcccgttcaacgccgtatctcgttatcttcctttagcgatcatgcagagtgaggatgccggcttcttttatcacaacggttttattccaagcgctatccgggaatcgttgatacaggatatcaaggaacgacgtttcgcccgtggcggcagtacgcttagcatgcaattggtgaagaatgtattcttgagccgtaacaagacgatcgcccgcaagctggaggaaatgttaatcgtatggctgatcgagagcgatcatctgacctctaaagagcggatgtttgaggtttatctgaacatcgccgaatggggccccatgatttatggagccgccgaggcctcacgttattatttcgcgaaggaaccttcccagttaaaccttgccgagtgcatttttatggccagcattatccccaagcccaaacaggtccgctattgcttcgacgggttgcggttgaagccgtattatgaggatttttacagggtaatactggatcgcttggtagatcgcggacttatatcttcggaagaggcggtaggggtaacgccggagtctgtcgaaataacaggtccggctaaggaatacctgacggctacccaaagtcgatctccacgctcgtcccaacccctagatcagaaataatattcaccttcgccccataggtgctcaatatgcgtagcgagaggcttagcccgacaccatgcccggcgtattcccgggtattgctcgccctgtaaaagggttggaagattcgtttcaattcctcgggaggaatgccgatacctcggtcggatatggtcaagacactgcctcgaagccgcatctctaccgatttatcgtccgaatacttacaggcgttgctcaagatattcttgatcgctatcttcaataaatagggattggcactgatcatataagagaaattatccggggagaacgagatccgggccgaggagaactgcatcaagaagtccgctaggaagatcgtctccatcgcgcttttctggatctccttatccccgtgcgacaggaacagcaggtgtttgatcaattgtatgatacggctcgtctccgtggcgatacgtcttaatgccgcttggtattcctccggggagcgctctttcagcaggctgatctcgcattcgccttgaatggctgtcagtggattgttcaactcatgcgaggcgttgctgataaacgctttctcactttggtaagcagcgtcgatccggtctaccatccgggtcgcgtatagtctgccgacaaaatagatcaataccgagctaaccaatatcaatcccagcaacagccagccgatccgatgctggatatccatcccatactgattcccggaaaggacaatcacgatgaaattcccctcgttgtcgggataatacaaagccgctcccatttgcgtatcgtgcttgaagtgaacgatatcctcttggtatagagatctcacctgcgtggcgtccagataacgggacagcacttgccgggtctccaagctatcggcgttcagcaatatctcggtagcgacgggaagggtttcctcgtaacgctgttggatacgggcatagctctcgtcgtcggtctcgtccttctcccaatgcttctgtgccgtggcataggctttttccgtcaggtaagaatagtacaggcgagagatatagctcgtggaaacccaatagaagacaagcgtcacgacggctatcacgcctatggtaatggccgagtaaaagagagcgatcttgtttcctgtcttcatgcttccatcatatagcccacgcccaccacggtatggattagcttaggttcgaagtccttgtctatcttcgtgcgcaaataattcacgtagacatcaaccacgttcgtattggtatcgaaatccttgtcccagacattctttagcaagttcatccggctcagggccgttccttggttctgtatgaaatattccaagagcctatattcctttaccgtcaaatcgatgacctgcccattccgtatagcccgatggcttggaggatctaagaccagatccccgcaccgaagagccatatggacggattcgtttcccgatcgacgtaataacgcctttatgcgggcctcgagctcttggaagctgaaaggttttaccagataatcatccgccccggcatccagcccactaacgatatcctcggtggttcccaaggcggtcagcatgatcacgggagcatggtaaccgaaccgttgccggtactgtttgcaaagttgcaggccgttcatcttcggcattataatatccagaatcagcaattggaaatcgttcttctgtgtcagttcccaaccagcggcaccgtcataagcgacatatacctcatgcccgaactcccgcaagcctctttctataaaagaggcgatgtttatctcgtcttctactaataatatcttcgccattgtatcgtatgtattaataagaatgtccatcattaataatgcgtacttagggtgatgctaatcgtatcacagaggtgaaacgttcttttcacggttgtgacacgatcgtttcacctctgtgatatgatcttttcacggccgtgaaaagatcagtaagtataatcctttcgcataataactccagtcgccctccctaatagttccggactttcttgctacaaatatagcaattacaacctacgttgcactaatttaccgttcttatcatagagcattcgtcgataaaaagcctccaccatcaacggaaagacaaagagggtgaagaacgtggcccctattaatccgccaatgatcacgatcgccaagggacgctggctttccgatccgataccgtggctcaaggcggccggaagcaggccgatagcggccatggaggcggtcattaatacggaacgtacccttgatttcacgctcatcttgatcgaatcttccagaggatgcctctcccgcaggttattcttgatgtccgatatcatgatcacgccattctgtatacagataccgaagagggcgataaagccgataccggcggagatcgagaagttgaaattcgtgattaatagggccaagatacctccgacagcggcgtaaggcacgttcaataagaccagtccggcatcccgggcgttgccgaaaaggacgaataggatcacgaagatgatcgctatacttacggggacgacttgggccaagcgtttggtagcccgttgttggttctcgaaatctccggtccatttcaaggtatagccttcggggagctttaccagcctctccactttccgctgggcttcagccacggcgctacccatgtcgcggccccggaccgagaatttcacggcgcagaaacgagcgtggttatcccggtagataatcaacgggccggtaatcgtatggatatccgccagctcgcggataggaatcatggaaccatcctttgccggaaccagtatcttgcctatctcattctcgctacggcggaaagtagattcgtagcggaccatgatattgaacttacgctcgtcctcataaagcagggaggcgctcttacctcctatcgccatctcgataatggattgtacatcctccttggccacgccgtagcgggctaaacgagactcgttcaactcgatccgtagctccggctggccgatattccggataacgcccagatcctcgataccgtctacggtctccaagaccttgaaaacttctaccgcttttttctccgactcgtatagatccttaccgaagactttcacggcgatggaacctttcacgccgctggccgcttcctctacattgtccgagataggctgcgagaagttaaaatccacgcccggatagatcgccagatcctcttgcatcttctcgatcaggcccgctttcgagcgttcgctttcccactctttctcgggatatatatccacatggaactcgatgttgtagaaacctgtcgcgtccgtgccatcgttcggccggccggtttgcgataagacctgacgaacctccggataagccgccagcttccggcgcatctggttggccaatgtaacggattcatccaaagatatactttgcggtaaggtcgcacggatataaatagagccctcgttcagttgcgggagaaactcgctgcccaacaaggtgaagcaccagatacctacggcggctaccaacgtggcgaacgtgatcgttcgcttcttacgggcgtgacaccagtcgaaaataccgatcgacttccgattgatccatgcgaggaacggattatgtttctcacgcacctctttctttaatagcatggaagagaggacgggtaccaatgtcaacgtaaagatcaacgctcccaacaaggcgaaccccaaggtataagcgagcgggctgaacatctttccttccaccttctggaaagagaagatcgggaccaaggcggtgatgataatcagcttagagaagaaaaccgctttcgcacggtccttcgccgtatgacggataatacccatcttactcatcaaattgaaagcgggcatgcctacttcacgggctttccggtccaatgccacgaaaagcccctccaccatcacgacggcgccatcgataataataccgaagtcgatcgctcccatagataagaggttggcgctcatccccatcgcccggagacaaataaaggcgaagaggagtgccaacgggataatgatcgacacgattaccgtcgtacgccagtccgccatgaagattaatacgatgaaagttaccagcagaataccttccgccagattatgtgttacggtcttgaccgccagatctaccagattctcacgatcgtagaacgatacgattcgcacgtcttccggcaaggcgttttgttggatatccttgatcttatccttcaaggcggcgattacctcgccggggttctccccttttcgcatgacaacgatgccttgtacgacatcatcttcctccatgcggcccacttgccctaggcggggaagactggattcgtgtacggtagccaagtgcttgacaaggattggcgtgccattgatattttttacgacgatgttctcgatctcttttacatcgttaatcaagccgataccccgcacgacataggcttgcgagcttttcgtgatcacgtcgccgcctacgttgatattactttttgcgatagcgtcataaagttccaaggtcgttaccccgtaactgatcagttgattcgggttgacgctaacctcgaaagtctttacttctcctccgaagctgacgatatccgctacaccgggtacagcccgcaacttccgctcgatcacccaatcctgcaaggtcttcaattcccggacggaacgcttatcgctacgtaatgtatagcggaagatctcgccggtcggaccatataagggctgcacttccggtgtgaccccttccggcaggtcggcgtcgttcaagagattataaacttgctggcgggcgaagaaatcatccaccttatcttcgaacatcacgttgatgacggaaagaccgaaaagggtcgtgctccggatatccgtctttttctgtaccgggttcatggcgatctcgatcgggatcgtgataaacttctcgatctcctcggcgctcctgcccggccattgggtgataatcgtcaccttcgtattcgtcacatccggaaacgcgtcgatcggcgtatggataaagctggtgataccggcgattacggcgatcgtggtacagaagaagataaagaatttgttccggagggagaacgttatgatattatctatgaatgtgtgcatatcgtccggttactttaattcgttatacaccaagagagcgttccgatctacgatccgatccccatccttcaagccggatcgcaggtaacagaacttctcggtttgcttatacaccgagatctcacgcatttgcaaatatccctccttcgagacatagacaacgtattctttgccatcctcgaaaataacggcatgggcgtttacgcaaggcatactttctccttttaccgcgctttgtacatatacgttcgtaaacattccgggtttaagcatatacttctcgttccttaatttgactcttacgctcatggtcttactttctcggtctagcatatgatagaccttatcgatcgttcccgtaaactccatatccttataggccaaagtggtgatacgaacggtagccccctcttttaccttgctgatatctccctcatagacatcggccatcacccagacatcgtcgagaccggaaatggtaaacatctcctccccttgatcggaacggatctgcatatcccggtttatattcttatcgatgataaagccggagaccggcgctttcaccacataggtagatgggtctgttatgttataaatggaatacatttcttgaatacgtttggtctcggcatcggcatcggcttgctcttgctgggcttgcaggaagtcccggtcggaagccataccgctccgggccatatcttgggtagcctccaagttacggttagcgatagccagttgatgctcggcctcctttcgctgcttgtcgatatcagcgatctcgccgctccggatcactgctaggacatctcctttccctacgtaatcgccaacttccgcatgaacggaggtgacatttccaccaaacatcggatacacatgggccactcgctccggattgaaactgacacggccattgagcaacaactcgttggttaatggtgtgtcacgaaccgtatccagtgttataatctcctgtaaactgtcatttaatagtaaaggttcccgggtatcgaccgaggtggtcgcctgtttcccgcaggaacataccaagggtactaaaaggatgcatgtgattagatgcttattcatatcgtttgatttgcttttaatagttgaatacatggctacccgttacggtatttacctcctccaaggccagtaacacttctttttgagtttggtaaagtcgcaagcaggttgttttgtaggtctcataataatcgataaactcaaggagactgatattccgtttttggaaattcaagttcacgccttcgataatcaaggcgaaatccttctccaatccatagttcgaggaacgatagagctgaatcgccttttccaaccgggcatagctggtgaataattcattctcggcttgtcgacgggcgtattcttccttatgggccttttgagcgacggatattttcgccgccctgatattcccttgattccggttaaatatagggagagagacgctcaagccgatcgcccaataatcattgataaagttacccgccttatcatacgtaccctttacgctcacttccgggaaagcgagggaacgttgtaatctcacgtccgcctccgaagccttgacgcttgcttgcgccaacttaagatccggacgttcgtataataaagaggtcaattcagagaaaggaacggagtccatatcgatctggttcaacacagactcatcgaatatcggctcgaaggtatcattgccggatattcctagtaaaagccgcatgtctccttgaagggagataacttggttggcgatatcattccgctcttgccgtaaagagagtaatagggcctcgatacgggacttctctaataaagaaacattccctttctcattctgctccttgagaaccaccaacagatgagccaatgaatcaatctcacgatcgtaaatagattgggatttctgggtgaaataaagcgctatgaatttctccttcaactcgctccggagggttctcaatacctcttcgaattggtaaagggccatttccttattgattttctccaaacggacacgtttgtttcgctgaccggcaatatagatcaactgttccacctctacgatcgtttccccttgtttcccgaaatcaaagtaacgtccgttcaaccggttataaacattttgctccaaagagaccacgggattctcgaaaagtttggcctgtactacttgggcctcggctatatcgatattataccgttcggctatcacttccagattgtgttcagagaaacgttgctcggactctttcaaggagagggagacaacagaggctttcgccccagagaaaagaagagataaaaaaagtaaaagagtgactcgtctgtccatttgcgttaaattttacgcaaaggtagaagtcactcttttatcgcttatgaatatttagttagaatactcttaggccaaattagaaatttattagagagatttaaagtataatattgttttctttaatccttcctccaaacaaaccgtaggttcccacccatctaatttctctttggccaacgtaatatcgggcttacgttgcttgggatcgtctcccggcaacgggcggtatacgatcttagaggaggagtttgtcaaacggatcacgatcttggccaactcgttcatcgagaactctccctgatttccgatatttaccgggccggtaaaatcatccgaggtattcatcatgcgaatcatcccctcgatcaaatcgtctacatattggaaactacgagtttggtttccatccccataaatcgtaatgtccttattttgtaatgcctgtataatgaaattagagacgacacggccatcgttcgtactcatattaggcccatacgtattaaagatgcggatgattttaatgcgaaccttgttttggcgatggtaatccataaataaggtctcggcgcaacgcttgccctcgtcataacaagagcgaggccctatcgggttgacatttccccaatagctttccggctgcgggtgtatcatgggatctccatacacctcactagtagatgcttgtaatatcttagcgttcacccgttttgccagacctaacatattgaccgctcctaacacggatgtcttgatcgtctgtatcggatctatttgataataaactggagatgcgggacatgccaaattataaatctcatcgacctcggcttggaacggtatagaaacatcatgcctgatcaactcgaaatgtggatttttcagcagaggaatcacattctccttacttcccgtaaaatagttatccagacaaattacttcatttccttcttctaaaagacgggcacataaatgagaaccgataaagccggcgcccccggtgataagtatttgcttcattatattaaatttatttcgtgaatttcaccctataaggtggatccggacgtaaataatctatatccagataaggaatcttaggatagatcaagtccagatagcggaggtctaaggggccgggaacgacttctatccgtaccttagcgacacctttatcgataaaatccaatatctcggcggcgctcgctgatacatcaatgattcgttttctataacgaggtccacgatccgttacgcatacaatggtacttttcatattctccaagttcgtgactcttaaaaaagtaccaaaaggatacgtacgatgcgcggcgactaattcttctttatcatgaacccttccactggatgatttcctgccgtggaaacgatgatggtaatacgaagcaagtccttcctcctgtgcccatattccttctccacacttaactgcggcaaatataagtaatatgtagaacaagcggaaggacatgtacctttttttaatcaattattgaagcatttttccattatattctccgttcaaagtccttagaaaaacaacgattttttcaacttctacatcattgatctcctttccgatctggaactcatgcatgatacggatcgcatcctctacagaggctaccgttccgtcgtgcatgtacggataagtcagcatcacgttacgaagtgtcggggttttgaacttatgacgatcggattctttcttagtcacggcatagcgtccgttatcaccgtccgtcaaccctgtattccggtaatcgaaatagctgttcttgatacccatgaactcgtaagattgaccaccgacatttacaccaacgtgacaagtagcgcatttattgtccttgaatagttgataaccctctaattcttccgctgtaagcgcgtttttatctcccatcaagtatttgtcgaaacgactcggcgtaagcaaggtcttctcaaactcagcgatagcgtccgtgatcgtagattgagaataaccttccggatacacttccgtgaatttcttcgtgaaatccttatcttgcgctaaagcctcgcaaatctggtcgaatgaggtacaacccatttccactgggttcaatggaggaccagccgcttgctcttttaggtctgccgcacgtccgtcccaaaattgaacgaaattaagcgccgcattatatacggtcggagcgttaacaccaccgaactgtccattaataccttccgaatattgcttacggtctacaccacctgtgttcaatccgtggcaagtagcgcaagagatcgtattgtccgcagacaaacgagtatcatgatacagggcaaaacccaactctaccttcgccggatctgtaggcaagctcttcattagaggctgaagaggctcattcttaaattcttccgctacggtttcggtcgtgaaacgatctttacggacattcttcgcccatgagatgatcaccgctttctcattgtcgtcaaggctagttccccagtgcatcggcatatgggaatacttagccgggggcatagagccgcttagggccgtattctccaccttcgccaaatcaacctctgaaacgggctgcccgttctccaaggcttccaccatagcagtcaagtccacatagtgaacggcctccttcatgtctgcctgtactacgggaccgatcaacggtaaattaccgtaaaatggcagaggcgcattttcagagtggcaggccaaacagtcgttttcccgcaggatagaggccacttgcttaccttcattgtcggcaaatttcttgtattcggaagaaccgcacgaggtaaccgcaaaggctaaagcgcagagtcctaccggtaatgccgtcattttagcataaattgttttacgcataactatatttatttagatttattaagtgcaaatatagaacaattcacttacatgtaccctaaaagccttggatttcattgatcagttttatctatgggaagataaatagaatctatgcggtgggcttccatccgcagcatcgcggcaagctccttcctataatgcccagtatgaggttctaacaatgggcaatataaggatgttacaatgcccattataagcagctaacaatcgcagttataagcaaccgccaatcgctatgtggataatccgatttttttatatagctttgtctcattatgtataatcaataaattataaggcaaagatgtttaagaacaaagttgtatggattatcatcgctatcgtagcgatattattcttttgggtgaaaggcgtgtataataatatggtaactcaagacgaaggcgtgaaaaccgcatggagccaagttgagaaccaatatcaacgccgtatggatttgatcccgaatctggtaaatacggtaaaaggatacgccgcgcatgagaaagagactttagaaggtgtggtcaacgctcgtgccgaggcgacgaagactacgattgatccttctaaccttactgaggaatccttgaagaaattccagtctgcacaaggagagttaggaaatgccctctcccgtttgatgcttgttttagagcgttatccagacttaaaagcgaatcaaaactttatggagcttcaagcgcaattggaagggaccgaaaatcgtatctcggtagagcgtaaacgttttaacgaggtagctcagtcttataatacctatattcgccaattcccgaacaatattttgtccggaatgttcggcttccaatcgaaagcttatttcgccgctgaatccggtgcgaaaaaggctcctaaggtagaattctaatagccattcgctgaatgagtgagataaagaatataggatctaggtgcaagtgtccggtaagccttttatggatcagtttattgctggttggttttgcctcctctattttcgcggcaaaggattattcgatcgagaccattccgaacgtacgtctttccaaccggttgaaccatgtcagtaatccggatggtatcattaccccggatgacgcggcacgtatcaatcaattattaaatgtagtggaagatagtctcggtatcgaggtagctgtcgttgccgtgaatagcatcggggatcaggatgcccggatgttcgctacggatttattcaaacattggggattgggacaaaagagcaaggataatggtttattgatccagttggtgacggaaccttcccaacgttcggtcgttttcgagacgggatatggtatcgagggtgtcctccccgatgcgatttgctaccggctccagcagcggtatatgatgcccgatctaaaggccgggaattatagcgccggcatgttgaaaggagtcatggcggttaccaagtatttaatgtccagcgactatgaacgggcaggcatgactggcaaccgttcttcttcctcgtccgatgatgattttatgtggatattcgtggtggggattatcgggatgatcggtttctcggcgtttatcgcatacttaaagtatcgtccgaaggcatgtccccgttgtggaaagaaaacctttgtgtatatggggcagcaggtgatccgggaagcgactcgtttctcggaaggtctggccgaagatgtataccgctgtaagagttgcgggtatacagagaaaaaaaatcgtaccatcgaccgcatacaccgaggaggaggtggccctattattatgggtggcggtggtggtttcggaggttttagcggaggcggcggtggcggctcttggggaggtggaagctccgggggtggcggttcgatcagtcgtttctgaaaatacgattattcgcattattttatacaagcggtcacgtaaaaccttatgtgaccgcttgtgttttcgtatcttattgctctttcagatagtagtcggaaagtatatcccgtactttctcgggagtaacccttccatagaccttcccgccgatcatgaccaccggagctaatccgcaagcaccgacacagcgtaagcaatccaaggagaacaaaccgtccggtgtagtctctcctacctttatttccaattgacgttgcatttcttccagaacattttctgcgccacgcacgtaacaggccgttcccagacaaacagagatggggtatttccctttgggggtcatcgtaaagaatgagtaaaaagtaactacgccatatacccttgagaccgggatattcaatttggcggcgataacctgttggacttccggtggtaaatatccgaacaagccttgggcggcgtgcaagatattgatcaactccccgggatcgttgttgcgttcagcgcatatcgcatgtagctccgctacttttgttttaggcaaatgtatctcattcatggcttatttacttttttcggtttctatatacataccgattacttccttacgatctatgtaatgggtatgcagtaatttatgggctttcggtccgcaaggctctcccaaatactcgctgtataattgctggatatacggattctcatggctcttgcgaagcggtttgttagcgtcttcccggtaaagagcggaagcacgccggcgaagtacctccatacggcctcggtggaacggttgtccaccaccgccgatacagcctcccggacaagccatcacctcgatcgcatgataaggagaggtaccgttcttcacctcctcgatcaatttgcgggcattccccagaccatgagcgataccgatctttaccggagtcccattaaaatcgatcgtagcgctacgaataccttccagcccgcgtaactcctcgaagtccactttatccagatttttcttcgtatataattcataagctgtacggcaagcggcctcgataacaccgccggtagtaccgaagatcacgctcgctccggtagattcacccaacgggctatcgaactcaccatccggcagttcattgaaatctatattcgcataacggattaaacgggctaactcacgggtatagatcgaataatctacatcgggattaccttccacgctaaactccgggcggctagcctcatacttcttcgccaaacaaggcatgatagatacgactaccaaatccttacggtccactcccaacttctcggcgaaataactcttggcgatcgctccgaacatttgctgcgggctcttggctgtagataaattatcccgtaactcggggaaatgttgttccacaaagctaacccaacccggacaacaactcgtcattaacggtattttcacctctttgtctccatttaggtaactacctaggcgatgtaataattccgtaccctcttccataatggtcaagtcggcggcaaagtccgtatcgaatacataatcaaaacccaattgacgcaaagctgaaaccatcttgcctgtaaccaatgtacccggctcatacccgaaatcacgtcccaacgctgtgcgaaccgccggcgctgtctgggcgataacaattttagtaggatcggccaaagcgtccaagaccggctgttgcgtattacgtccgctaagcgcgtttacaggacagacggatacgcattgtccacaatacgaacaggtacttccggccatatcccgttcaaaagcagtcgatacggccgcgttaaatccacggttcacggcagtcaaggcgccaactgtctgtatcgtattacacatggtctcacagcggcggcacatgatacatttgttcatgttccgcacaatggaaggggaacggtctatcgtaaatgtggacatctctcccttataccggatctcacggattcctaagtcatgtgcgatcttttgtaactcgcaatgtccgttgctgctacatgtcagacattccgccggatgattcgagaggatcagctccatcaccgtcctacgggcattcattacccgaggggtatgtgtccgtacgaccataccttccgtacattccattttacaggatggggctaaatttctacgtccctcgatctctacgacacaaatacggcaagctcccggattattctcataatgcaaatcctccagtttcatataacagagtgtcgggatatggatacctacactttttgccgcatctaaaatggtggttcctctcggcacttccacctctttattatctatgattaatttaattgtttccatgattgtaaatgaatttagtggacataaatcgctccgaacttacacttctccatacaggtaccgcaacggatacaagcttgcggatcgataatatgaggaattttccgtccacctgtaattgcgtgcaccggacaaacacgggcacagagcgtacatcctttacatttctccggattgatgaaatattgagtaagttcccggcattgatgagacggacaacgatgctcccggacatgcgccagatattcatcgtagaaattatccatcgtagataaaaccggattcggagaagtctgtcccaagccgcataaagcggtatccttaatcaccatcgccagattccttagacgggtcaaatcctcttcggttccgtttccactcgtaattttctgcaatatttcatgtaagcgtttattaccgatacggcacggtgcgcatttaccgcaagattcctcgaccgtaaagtccagatagaacttagccatggctaccatacaatcatcctcgtccatgacgatcatacctccggaacccatcatggaaccagcggcaagcaaattatcataatcgataggaagatcaagatgcttttctgtcaagcaacctcctgacgggccaccggtttgcacagccttaaacttctttccatccttgatacctcccccaattccaaagataacctcacgcaaagtcgtacccataggaacctcgatcagccccacattgtttacctttccagccaaggcgaacacctttgttcctttgcttttctccgttccgatactactgaaccatttagcgcctcttaacaagatcaccgggatattcgcataagtctctacgttatttacattggtcggacaacctttatacccgtgttcactagggaacggcggctttacggtagcctcgcctcgcaaaccttccatactgtggatcaaagcagtctcctctccacaaacaaaagctccggcaccgtaccggatctcgatatcgaatgagaaatcagtcccaaatatattctcgcccagcaatccatattctttcgcttgccgtatggcgattttcaaacgttccacggctagcggatattcggcacggatatataccaaacctttgctagctcccgtacaatatccattaatcgccatagcctccacaatcgaatgcgggtcgccctccaatatggagcgatccataaaagcgcccgggtcaccctcgtccgcattgcaaaccacgtatttttgaggtgcttgtaccttacgggtaatctgccatttcaaacctgtggggaaaccaccgcccccacgaccccgtaaaccgctatccatgatttccttgattacttcctcgggagtcatttccacaagggcttttcctaacgctacatagccgtcacgagcgatatactcatcgatattctcagggttgataaagccacaatttcgaagggcgattcgtagctgtttcttatagaatctgatatgcttggagtccggaaccagctcacgggtctctggattcatataaagtaaccgttccactttacggccttttactaaatgctcccgtacgatctcgtccgcatccgatggttgaacttgtacgtaaaaagtgttatcggggatcatcttaaccaccggacccttctcgcagaaaccgaagcatccggtacggatcacttgtgtatcctctaatccgtattgctcgacggcggctctcagattctcgatgatctgctcgctttgtgatgcacggcaacctgtgccaccgcacaccaatatataattcgtgtattgtgccatttatgtaagatattaaatttcttattcgggttttacggtggtgtaagttacaggaatgatgccgtctaccaagatacccttacggatatacttatctatgatctcttctacttttgccttatcaacataaccgaataccaacggctcctgacccggaagcttgatttcgatagtcggttccgcataacaatagcccatgcatccggtttgagttaccaacgcatcgattttctgccggtctaaaacctcgataaaataactcattatctccttggctccggcagctataccgcaagtggccatagaaaccttaatttgtacgagctgatcaggggtattgcttttttcacgcagatccaaagacgcacgaagagattcacgcattttcttgagatcatctaatgtctttactttgttcatggtcatattctattatttaaggaaaacaccgtaatgtcatttgcacaaacatacggaatctctttcaaataatatcatatttccgtgaatttttcttcgacacgtgattgagatatcttggaattgggaggtacactatgggtgagccagatgttacccccgataatagatcctcggccaatagtgatccgtcctaatatggatgcgttggaataaatggtcacataatcctcgatgatcggatgacggggtaaatctatcggaagtccttcctcgtccagcgtaaaactcttagctcctaacgtcacaccttgataaaggcggacatggtttccgataatggcggtttgtcccacgacaatacccgttccatgatcgatactgaaatattctccgatctgcgccccgggatgaatgtcgatcccggtttgcgagtgtgccatttccgtaatgatacgcgggagtaccggtacgcctagctcgaataattcatgagcgacccgttgatgtaaaagcgcgtagaccgccggataacagaatataatctcactcacgctcttggctgccggatcaccatccaagatggcctttacatcggtggacagtaaatatttgatatgaggaatccggttaataaaagcgatcgagatctcggaagcccggtccttggaatcacaacaacgctctacctcaaaacaaagtccattatatatttgctcttgcaagagatcatagatcttttccaaatagactcccgtataatattggatagagcctaattgagcctcttgttccgtaccaaagaatccggggaagataaccgtacgtaataggcgcatgatctcatgcaacgtagcgactgaaggcgatggcttctgatgcaacgggatatatttgtattccggtagatcaggagccgacagccgttctacgttcttctgtatctgttctaaaatcgctgttctattcatctttaattatcccaagtaggatcgtaactgattaatgagttagaggcattgcccaaaccgatatagatataattatccaagacatacatgcaatgtacagacctgttagccgctggtaactgggatttctggctccagttctgagagtccggatcatagcgccaaatataaccgtccccgtctacgccatatacgtaattaccataagcgatagcacataaaagcatccttccggggaacgaagcctccttttcccaagctacagcgttcttgtctgtagaccaaaactgtgtcgtatattccaaagaaggatccgctttattaataatccccagtccggcatatatacggtcaccaattacaacggatattccgccgtattgtttaatcgggaaattagatttcttgctccaaacgaaagcgctcggttcataagtccagacttcatcgattagttcgttacctctacgtccacctatgaggaacgcctgatcttccattctgcaacatgccgtccgatacatacctttaggccgttgctggtctgtttgtacggcgctccaagaattatcggacgtggagtatacatataaactgtcacatatctttcccgtgttatctaaaccaccaaaagtccataggccaaatccgatactgaaacatgcttggcccgataatttctcaggctgagaccttaagggcaaccattctttcttagaggtcatatatccccaaaactcatcggtgtattccctacccgtgtcaccgcctaataagaatcccgtgctattagccaaggtacagaaagaggtagatcccggtatccggaaagctccctcaaaccttgcccctactccaaatatatccggagtttggaagcgaacttcctctccgtaagcgataccattcttatttttagcgtaagctcttaaataatagctcgtgcctcctctcaattcctttatcgtacccgtaaacgcttgtgtaccggaagaaagagctaccgctccttcacaattaccaaaggccggactaggactagttccccaacatacaccagcctctgtaaccggtgaggcaccttcggctaagacctctcctcctacccatgcggtaccgtttttaatagtagacacctcctttgtattgactgtaggcaactcactttccagaatcgtatggataccttcgcctgcgctataggtagtacctaaagcgtttgtcgcataagcacgtacgtaataccctttctgctgttgcatatcatagattttcccggcaaattctccgatacccgctccgcaaataatcgtatccccattttctattgtcggtgatttatcagtactaaagcagaaaccacatgccgtgatcggagaatctccctcgcttattatttccatggagaactccgcataggtaaactctgtcgctattttcttgaatttgttatcatctaatacaggacgaccattcgtagtcttaaaggtctcgactttcgccccgttatactcaccatatttactttttgcgtaagctctaacgtaataggtagtttccggttttaaatcggagatcgtacaatagaacgaatcggcttccatgtctatacgaatcgtggagtcagatgctgaaggctccggattcagcattaagtaaatacccctttcctcgatttcggcttctccttgtttggttatcatacctccgcattgaacggaagtagacatcacgttgactggaaataaggtcttaacgcttcctaatccatctttcgtcttaaaaggtaaaatctctccataagcggtatctaccgcattgatcgcataggcccggatatagtaatccagatcattggttaagccctcgatcgtagcctcatattttaccttacgcttggatacggcttttttatttttctctatcacagtaaaggtagattccgtgctccaacaaaaaccggcctctgtcacgggagcgccgttttcttgcaggacctcccccgatactgtcactgaactagccgtggacttcaatatctcgtctgtcttaacagacggttttttagcgtttcgaatgccaccatctatatccggatcattcacgcatccggccattaataaagccgcaaatagaatagagaagagtgagtatatatgtttcataaataatcaatattaaaagaatacacctaagccagcgtttagatccaagtacttaaaattaaccgtgttgcatccaacgctaataaatacagagttcgttattttcatcatcaagtcaacctcggcagcgacccctttgtatgaggaatcaatattccggcaccatacctctcgtgtactgtcgtagttttcataggaatgggtcgtgaacgaatgtagtaaagctctttcaccatatcccaaaccaacggaggcatataaccacggaaagcattttacgattaaaccggccgttccggctatactatttgtcttcgaggatttacctgtattaagctcataagattccccttccgaattagagaacttaataatctgcccttggttattacattcgtccgtataattcataaaagacatattcgtcttgaaacggacataccaaccgaagcgttgccccatacctcctaccgtgattccataaggagattcgatcgaatacgagtatcccgcgaaaaactccattcgtttcttaggggataccgccgcggaatctattggttgggccgccggttccgccggctttaacaatatctcttggtattctttccaataggttgctagctcctcacttttaggggttccgataccttccgaataataaatgattaatttagagatggcatccggatcatcttccgtagctttgaccgtcaggcagtttaaacatttattcatcaagctacgcatggaaggccgcattcgctcgttggaaagccaaatcgtagtcagctgatcaatactgtatgcgtcgcattgcgatacgccttcctcgtaccacattttagcgtcactataatcaagacgtttcatcgcttcatctcccttacggttgtattccgtacgctgttgcgccagcagtccgaggggaaataccgcacatatcatcaatatccaaagtcttttcatataataggtaaatacatgtttagttgttcataatattacaatcaataataagtaaggccttcgctaatcaatgatccgtcagaattataaatatcaaacaaattgtcttcccgttcgaatgcccggccgttatccgcgataccgacacttaggtatttgcaaggaatacgttcctcggctttcgaatcgatcgccccgtatctgttatttgacttcttgcgtacgatcttatatcgtccgaaagccattttctcctcatacagggcctttttgtccgctatacgtttctcctcggttttctcatcgcaagcgatgatcaaccggactacctcttccgtaagtttcgtatcctttgcctccgacaaatctttcttagctcccgaataatcagctttggccattttttccttaccggaggcgattaacgagttatatttctcattcatctcattttccgatggctgatccgggagaacattctcttctatcgtatgctctgtttccataggtcgtttctcttccactttaggctcttgtttctccgctttctttatctcagagataggaggttccgtatgtagaactgggtgatctggcatttctacttcttttgagacattgctatccggctccacagctgaaggtaaatcaatactctcgacaacctcttttgtgggcctattgctatgcactaaaagagccgtagcggatcctacaacgacaaatatagcgattccgataggaattattttctttctggaattattcttttctgttattggctccacggcaggtggattagccacattgacaacagtctcttcatcatccgatcctactaatttagaatctacaggtgatgaataaaccaccgttgtttcctcattcacaatctcgggagatggacttgggacaacctgaacttccttttccgcttgagaaaaatccaaagacgccaacatctcgcccaccgtctcaaagcgatccgcaggaatgatttgcatcgcttttatgataacagcctctgttttcgggctgatcgccgcattgatttcagaggggtttcgcaaaggacgtgcggcacgtagtatagattctgtagggattgttcccgttaacagattatacatcgtggctcccaaggaataaatatccggacggggcgagaacacttgtgttccttcgttatcgtattgctctatggatgcgaatcctttagaaagggttaacatcgtagtgctggtctcttcctgctcgatatcgtaacgtttgctgactccgaaatcgatcaagcgggcgttcccgttcttatcgatcaagatattgctaggcttgatatccagatgcaagatactcttatcatgaacgaattgtaacgcctcgccaatttgccgtacatatttaaggaccgtagcttcgggcaatatcccgtttttctcaagcatatattttagcgagaagccggaaatatactccatggcaatataagccgtattgttttcctcgaaaacctccaacacgtttacgatatagggatggtgaacttccgataggatctttgcctctttgatcagtttttccttgaacttgttaaataagacctttcccgtctccgaatgtacttttacggcttgggaaccgggttctctataacaataatccttgaagaaatattccttgacacagatagggacctccgtctttacggtacctaaagatcctttaacctctgtgtaccaaactcctctgtaggttatgccaaaaccaccttgaccaaccacatgagtaagtctgtattttccgttttgaagaagatgtctgtctggcagattcataaccttgaataattccatttaatctgccaaaagtacgttatttatataaaagaataaagaaaagagagaatattttgcttaaaacccatgctatcttccactttttgaatagttatgatataaaaagaaaaattatcccgagtcttgccgtcacaggcttccatgagagcgtcctttatttccggaacagataaacgaccattaaatatctctgcaatcttttcattcttcagtctttcaagaaccccgtccgtacaaagaaagaggaaatcgtcgggttgaatatcgttcaaggtaataatgtccgcttctgttggagtatgagtgccttgtatagcccggataatcacattccgctgggggtgggttaacgcttcttccggagtgatcttacctaatttaaccaacgaatttaccaatgaatgatcttctgtttgatataaaatctcccccttcctcagatgatagatccggctatctccgatatgagccaatacgattccggaagaagcgatataggccatggtgagcgtagtagccatacccatcgcttccggatgctcttgaacataggagtcgaaacagacttccgcataatgtacggctttatggataaactctggcgtgggatcatcctttaggaacgtagaaaagaaagtttgtatggactcgcaagctaatgagctggctacctcccctttctcggctccacccacaccatcgcaaaccataaacaatttttggtcaagggtcacttgttcgggaagcgggtaaatggaatcctcgttattcgatctgcctcctttttccgtaatagcacatggcttaccgatcgttataatcataacaaatgagttttattcattaaaacgtaagacggtgcgaccaataataatctcgtcattatcattgagcacgaccacctcgccattctctaggtaactgttattatataacgtatggtttttactattattgtcggtaaggaaatgtttatatccaccttttgaatcttttttcacctcaatgcaaatatgctcgcgactcatcgtgcgatcagccgtgataattggcatcgtagcttgtgaggcgttcgacttccggccaatgacaaccttcccttcgtgaagaggaaacgcttgttcaggtgtatcggcgtctggaagaaccgtcagtctgccgattccagtcttgacaggtgtcactaaaatcgtatcggaatcgacttcctgatgattacttttctcggataataaggacaaaggaataggctctttgcatttcggacacttaaaggaggtaatgccgaggggaatcttcccctcggctacctttaatcctacatggcaatgtggacatttaactgcgatcatacgataaacgaaatatctgcgccatccatatccgtagagtacagatccatcatatctgtatcggaaagcataaccgtatcgtccgccaatgttataaagtctgaatgatcgaaagactcgatgctactatcgtctataactatggcgtcgcctaggtcgacacctcctccttccacgtctattatgacagcatccgctggcatgacgtcattgccgtctaaagttacgaatgtatattcctcttcttgcataacctttgttcctaatatattaatattccgaaaacaaaagtacaaaaagcaatggattaataaacttgttattctctcttataatcaaacatttgggtttcatgtacaaaagaggctgttttactatacgaaaagaaaaggctcattctctcacccatttggccttacaggaagaaactgggcattgctttcggtttttcaatgattcccaagggatctcacccaagaatgtcccacatttcgggcaaacatagtctatcttaaattgattggcgatatcctgcaattgctggggaatcttggccgactgcttggctcctagatagattcctaccgtaggggcacaaatcgttatcaggaggctgatgccgaatagctccgggctacctttccctaagaagcctatcacgacccccactattccgggcaaagcaaatggtaaggattgaaataatctggtcttaaactgattagaggattgaatcttaacttttgcttgaatataatcatcgtagacttttttcaatgcggcaaattcatcgctataatcattattgtatttaagcacctcggaaagatttaatacatagctatcccccaagcgaatatgatccgtaggagtaacacgtttctttacgatctgggcaccattcacgaacgtaccgttagtagatcccgtatcctccaataataagttgccaccatcctcacgtatcagacgggcatgatggcggcttacatgaggatcgtttgcaataaaatcgttgtcttttgcttttcctatctttataatcatcgtcttattccttttcctcttcctcttgaggctttcccatctccttctcaagattatctttcagcactttcaacggatccttggatattaccaactctttaggcttaccctcttccgtcaataataataaacgctgcttagggagatttatttgtaagatatgatttttatttatgatatgactttttccgacacgcattaatatcttgttacaaccagcgacctgcttctctaagatctcttctatttttccgatatttatagcgaaggtaaattggatgccatttgacaacaatagtttcgtatagttcctgtctgcttcaaaataaaggatctgaccaatcttaatgcgcaacaactcatcccttgtttttataattaaataccgctccatacgtagaaattgttttttcgtttctctttcaaaaacaaatatacggtattttctttatttaataggtatcttttgggggaaagattggtaaagtgcaccaaaaacaagagccttttccctgctcagaagagacaccgatacgccctcccagcctttcaattatattttggcagatagaaagtccaagccctatgccttgcttttggtttcgtcctttataaaaacgatcgaacacatgaagttttatttcctccgacattccttcccccgtatcggtcacggataacagaacctcgttctccatggcttgatatgacaagatgatgctacctatagaggtgtactttattgcgtttgttataaaattgccaagaacttgtttcaaacggatacggtcagagcgtaataaaaaggaattcaaagattccggataggtcaaagctacccctctcggtactttgatctggaaagaagctaccgtttctacaataagttgtcttagatcaaattccatgaaatcaaaggtcatggtaccagactcgagcttagccagatccaatacatcattaacgatacccaataataactcattattggtctgaataagattaatatactcttgtcttagctcaccatcctcttcatcccctaaaagagaagagaatccgacaatagcgtttaatggcatgcggatctcatggctgatgtttgccaaaaaggaggatttcaaacgctctgatttctcggccttcagcattcgttcttccatcgctttcagttcagatatatcataattcatcagtaataggatggggcttgatttctccagacccgcctccattatatccagacgaatccatttccatccctcgccatccttgacccgggcttcccgttgatcatgatcagtttctccgtggacaagtcggctcaaggaagttttcaagcattcacggtcttctggcttgacattggaatatatgcctactatctggctcaatggagttcccggaacttcacccatattcagataccattgttccatcgccactccttccccagtggacaaatcatactttgcgcagccgatcttggcacgatgacttatctgaggaaaaaaaggctcgaactctatgcctaatgtcgttttcatatatatccgttctcattatatttatgcaaaaagagggtttagccataaaaaacgaatgaattaatcgttcgttttaattagtcgtttgcaaatatcgcaaaaaacatttacttatgaaagtcaaaaagactttagaatataattttgatgcggtttttggggtattttactaaacctatatgttccctataaaataatcgatataaacgactaattaaaacgaacgattaaactagtcgttttgttgccttcccctccacttcaatatcctgatatataagattataccatatgactataaaaaaatagagggtagattgatcactcaatccaccctcctgtctaccgtgtgcttaaactattaaaaatcaaccccttgattagtcttctagagccgcttgcgccgctgcgatacgagctatgggcactctaaaaggtgaacatgatacgtaattcaagccaactttatggcagaacttaacggaagaaggctcaccaccatgctcgccgcaaatgccacatttcaaatccggacggatggcacgacctttctcagttgccatacgaaccagctgtcctacaccattttggtctagtacttggaacggatcgaccttcaaaatcttcttctctaagtaaaccggtaagaaggaagcgatatcgtcacgagagtaaccaaatgtcatctgagtcaaatcattcgttccgaatgagaagaattcggcgctggaagcgatacgatccgctgtcaatgccgcacgaggaatctcgatcatcgtacctaccttgaattcgatacgatcgccaacttccttgaatagctcttcggccgcggtacggatcaccttctcttgttccttgaattcatataagattcctgttaatggtaccatgatttccggtttagcctcaataccttctttcttcaaatccaaagcggcacctaaaatggcccgagtctgcatttccgtaatttccggatatgtattacctagacggcaaccacggtgacccaacatcgggttatgctcgcaaagagattccacacgtttttggatctccttaacggacacgcccattgtctcagccatttcctcttgacctttcaaatcgtgaggaacgaactcatgcaaaggaggatcgagcaaacgaacggtaacaggacatccggccatagccttgaagatacccttaaagtcctctttctgataaggaaggatcttcgccaacgctttcttacgaccttcagcgtcctcggccaagatcatctcacgcatagctttgatcttctcaccttcgaagaacatatgctccgtacggcaaaggccaataccaacggcaccgaagctacgagcgatcgaagcgtcgtgaggcgtatcagcgtttgtacgaacttgtaattttgtatatttatcggctaaagccattagctccgcgaagtcacctgacaactctgccgctttcgtctcgacctgtcctacatagacttccccggtcgtaccattgatagagatataatcaccttctttcaaggttacgccatcgacgtctacagtcttgttcttataatcgatattcaaggcaccagcgccggatacacagcacttacccatgccacgagccacgacagcggcgtgagaagtcatacctccacgagcggtaaggataccttcggcgacagccataccggccaagtcttccggagaagtctcaatacggaccatgacaacctttttgccatcggcatgccatttagcggcatcatcagcgaagaatacgatctgtccggtagcggcacccggtgaagccggcaaaccttttacccatactttcgcctgtttctcggcttttttatcgaatactgggtgaagcaactcatccagtttattcggctcgatacggttcaacgctgttttctcgtcgatcatgccttgatgcaataagtcgatagcgattttcaccatagcggcaccggtacgtttgccgttacgggtttgcaagaaccaaagtttaccctcttgtacggtaaactccatatcttgcatatcccgataatgatcttccaatttctcttggatagcgtctaattgcttatagatttccggcatggcttcttccatggacggatatttagcaatacgttcttcttctgagattccggcacgttcagcccaacgttgtgaaccgatcttcgtaatctgttgcggggtacggatacctgctacaacatcctcaccttgagcgttaatcaagtactcaccattgaacaagtcctcaccattacccgcgtcacgagagaaacaaacgcctgtagcggaagtatcgcccatattaccgaataccatggcttgtacgctaaccgccgttccccactcgtctggaataccttccatcttacgatacaggatagcacgctcattcatccagctattgaacacggcacagatagcgccccacaattgttcataagcgcaagtcgggaaatcctgtccggtctgggccttaacggctgccttaaatttagagaccaatgttttcaaatcttcaacgtcaagctcgttatctaacttaacgcctttcgctttctttacttcctcgatgatcgcctcaaacggatcgatatcctctttgcttgtcggtttcatgcctaatacgacatctccgtacatttgaacgaaacgacgataagagtcccaagcgaaacgagcgttgcccgtcttacgagacaatccttccactacctcgtcgttcaagccaaggttcaatatcgtatccatcatacctggcatggacgcacgggcaccggagcgaactgaaactaacagaggattggcaacatcaccgaacttagagttcattaacgtttcgatattagcgatcgccttctcaacatccgctttcagcaactctacgactttatctttgcctaactcgtaatactctatacaaacttctgttgtaatcgtgaatcccggaggaaccggtacaccaatcagattcatctcggcaaggttagcgcctttaccacccagcagatttctcatatctgccttaccttcggcttttccatttccgaacgtgtaaactctttttctttccatattcgacagtattgaatttagattctagttttgttgatttcaactgttatattgctatctcaactttgcaatgctgcaaatatatgctatttctactttgcaagcacgaatagcgttaaagatttttacatgttttacaactattctttaccatttatatccagcaaatgcttacatttgcgtgcggaagtttgttgacgcttccatttcccatcggatttcccgcctatctctttgccccttacatataattatatgatctttttcttttatttgtgtctatttatttccaataggaagactcaggagttttttgctgaagaaactttagtttctacagcatgaaactaaagtttctccctagtggaactaaagtttttctatagcaaaacaaaagttttccttataagaaattttaagaaactgcaatatattgatttataaacacatactatacatctctttctgtccataatcatatcttcatcaatcttgatagaataacgagaactgtttgccggactcatttaagtatatagaacgaagctctttgttcttagcggaattgtaagtattttcgcgaagcgaatttaaaacttaacgacattggcaagaaagaagaaacagttgcctatattagaaaaggtaaccattacggacgtagccgccgagggcaaggctatcgcgagagtgaacgatatggtggtatttgtacccttcgtcgctccgggagacgtggttgatattcaactgacccgtaagaagaatagttatgcggaggggaaacctgtatatttccatgagtactcggccaaacgtgcggagccgttttgtgagcacttcggtgtctgtggaggttgcaagtggcaacatcttccctatgaggaacaactttactataagcaaaaacaggtctacgataatcttacccgcatcgggaaagtcgaaatggaagagaaacttccgatcttaggttccgagcgcacgactttctaccggaacaagcttgagtttactttctcaaacaagaaatggcttacggaggaagagatccagtccggtgcttctttcgattgcatgaatggtgtcgggtttcatataccggggatgttcgataaggtattggacatccataaatgttggttgcaagatgatatatcgaacaagatccgtctttgcgtcaaggaatattgcctatctcatgagggatatcctttcttcgatttacggaaccaagagggattcgttcgtacgttgatgatccgtacggcatccactggggatttgatggtcgtattggttttcttccatgaggatgtagagcgcagggaagcgttattatctcatctggcggaacgattcccggaaatcacgtccttgatgtacgtcatcaacggcaaatgtaatgacacgatcaccgaccaagaagttctcgtattcaagggaaaagatcatatcatcgaggagatggaggggcttcaattcaaggtaggtcctaagtctttctatcagacaaacagtgaacaggcttataatctatataaagtggctagagaatttgcgggtcttaccggaaatgagatggtgtacgatttatataccgggacaggtacgatcgcaaatttcgtctctcgccaagcaaagaaggttatcggcatcgaatacgtaccggaggctatcgaggacgcaaaagtgaattccgccttgaaccatatagagaacacgcttttttatgccggtgatatgaaagatatccttacgcaggatttcataaaccaacacggacgtccggatgttattattaccgatccaccacgtgccggtatgcatgatgatgtgatcaacactattctcttcgccgagccggaacgtatcgtttacgttagctgcaatcctgctacgcaagcccgcgatttgagtttgttgagcgtgaaatactccgtcaagaaagtccgtccggtcgatatgtttcctcatacacatcatgtggagaacgtggttttgcttgagaaaaaataaacatataatataatgtataggaaatacgtcccctttctgctctttttgttcttcttgtatggttgcaacggtaacaaacaagaggagaaagaggacgtttccgttttcgtggatttaccgcaactgaaagcggaaggcgagatcacggcggtgactttatacagttctacctcctacttccaatataagatgcaacccatgggttacgaatacgatctgataaacgattttgccaagagccaaggtttgaaattaaacatcaaggtcgccgagaatcctgcccgtctgatcgagatgctagaagccggcgaggtcgatgttgtagcctaccctatcccaatcaataacaagctgaaacaagaggtcatttattgcggccgggaggatatctccagtcaagtattgatacaacgggccaataaaggcgataagcttcttaccgatgtcactcaattaatcgataagaatgtttacgtaaagcctaacaccaaatactccgaacgactgaagaacttggatgaggaactcggcggaggaatccatatccaaaaagtggaaaatgactccattgctaccgaagatcttatcgagatggtctccttgggcgaaattccctatacgatcagcgatgataacaccgcccgcctaaacaagacttattattggaatatcaatgtcgacctaaaggttagttttccccaacgctcttcatggggggtaaggaaaagtagtccggacttggcgaaggccatcgatgaatgggcttctgataaaacgggtaaacattctttcaaggcagttactaagcggtactttgaattaagcaagcaaccttttaccgcagatattccggaggtaaagaatggacatatttccccgtatgaccctttattcaagaaacatgcgaaaaacatcggatgggattggcagctgttggcgtctatttcctatcaagagtctcatttcaatcctacggttgtatcgtgggccggtgccgaggggcttatgggaatcatgccaaatacagcgaaggcattaggtgtcaccccgcatgaattgaaagatccggatacgggaatccgtacgggagtagattgtttacggcgcttccgtcaaggtttttctgagattacggatcctgaagaaaaagtcaagtttaccctagcggcttacaacgctgggatcggacatatttacgatgcgcagcgattggcccgaaaatatggaaaagatcccaataaatgggataataatgtagcggaatatattcgtttgaaaaatgatcccgagtattataacgatcctgtttgcaagcatggatacttgcgtggctcagaaacatataattacgtgcgggaagtgttggagcgttatcattactacaagaaaaagtcatagttataaaaaaattcatagctatgagtgaaagtagtcataactatgaattttctgcaagtaaatgccacttaaaaattataggcgacacctatgcctaatatttccttgaactggaccttcgccccccgtttctctccattatcctcaaaagttttcacgtcgttatcatatttaagcgtcgtattgagtgtagcggacaggaatttattaatcttcatgcttatcaatacatcccaattgacatcgatatttccgaattgatcgctataaggagtgaaaaagtccgcagtcgtaatcaagttcacgttttccatcacggttaattccgcacgagctttcaggtaagctccccattccattctgaagcgatctcccggatcgaccccgaaagctcctaactcagaaaggtaatcatcctccacgaaagtcatcttcgtggaagccggagaaagataaaccgagtaattgcttttgggacgatattccatacctacggagatattcgaatacgccggcgcaaagaagttcgatatataatgtgtcttatccggataattatatcctttggcaaactgggtgtttaaatctcccatcaacgtataataccatacattattggtggaatatcctaattgggtagacagggttatattatcggtacttttcctcattccctgcgatttagtctttgataatccgtaatcgagagcgagattggttacccataaccagtcaccggttttatgtgttaatgccccattcagatacgcatttccggcaacagagttctcaccgccagccgaccaattcgacatcgccgtttgcgacaagttcaaacctgtcacacctttcagtacccatttgccttcctcatatcctttatcatccgtttgaccatatgtgattgtcgttaatgcgacaaacaatgtcatgaagaatatacgtttcatattgtgatatattttagttattaaaaaataagacgtcctatcatttaaacaggtttgattaatttttgtttagaaaagcctaaagttgaaaggatgtcacatttgttacacctttatatggataaaccccttatttttgtatccgataattaagtaatttgatttatggaacagttacatgcacacgaagtccttcatatgatggagggtaatagttattcagaagcttctttaaaagaagcgatcgttaagacttttggtgaggatcagcgtttctatacttgttcggcggaaaatatggatgcggatgagttaatcgtatttctgaaacaaaaggggaaattcatgcctatcgaaaatggtttcacggtagatattacaaaggtttgtaatcattaaagattctacgacactatcaatgactttaggctaaattcttttgatttagcctaaagttaaaaaagactttcgattctactcaatggacaatactattcctataaataatcgcaaataatttttgcatcaattcataatctttatcagagacataacttagcctacggttacccgcatgatttatcatccagacaaaagactctatatactttagtatcttacttgaattatcactttttatacgtgacaaataatccatttttcctaaaagataattactcactttaagaacactcatcttattacaagttttgtattatcaggttgttttttatccatgattgatcctatacgggtaaaagtgtgagtccgaaaacctaccatacctgcgggccttccaacaaacattctataggccttttatgttatggttataaaatggtctatttatgcttactggttttttaaataccttagcgacaataataagtgtgacaagccttctgattgtcacctatggtgcattaatcggagtcatctcatttttcagaaatgagcttaagcgacttactggtaattattccattactaacataagaaaactaagagctgtattcggtacatacttacttctcggactagaatttttgatagcgtcagatatcttaaaaacagtattggagccaacacttaatgaattggccattttaggtggaatagtcgtgctgagaacagttctgtctgtctttctgaataaagagatcaaggaactagaaactgaaaataaagataccgagtagatcccataaagttttcaagggaaagtacagaaaaatggcgcttaagtcttgcatgaacaggatttaaacgccatgaagtaaagttagaaaaccaaaccgctcggccttcacaggtgaagcggaagtggatatattgccttaaactaataccttatattattacaaccagattaaaggtcataatgtttatgcttttgatgaatttcaatagccaaaataaaacagaaaataaaaatccgcatccagcgtcactgctacatgcggatccaaaataacaaactcttacaagagttaggcactacataaagttgtattatactaataagcagactgaaccgcatcaaagtgttgattccttatgttgtttttttctcatcatttacatattccaaaatgtcgcttggctgacagtctaatgctctacaaattgcctctagggtactaaaacgaattgctttcgcctttcccgtttttaagatagaaaggttagataatgtcaaaccaactctttcagaaagttcgttcaaagaaatcttccgctttgccatcattacatctaagtttacaataataggcataattaaactgttaagtcattctctgatttcatatctatcgcattttgcaataatttttcaaatacagccacggctgtcgcaactacgatagcgacaaaagtagttacgatacaaatggcaagaaaacctgcggggtcatcttctgtattatgggtcaaccttataaatagtcctgccaccacgattaaaatacttagtaagatcgcacaatgctttatgttctttaaattctttacagagtttgttgaaaatactttattttgcccaatataaccgagcaacctaaaagcattgtacaacgcaacaaaaaaagccattgacgctccatatccatataagataaatggatcagcgtaagtactaaataaatctaggtgtgtggctcgtccctcagttaagggaaaccaaatcaaaataataagtgccacaataccgataagaacaataactgtttgaagaaatgctgttgaaattcttttcatgacgtatgatgttaattttaaacgacgttgcaaatgtaacaaatatttattgataatcaataaataaataccgaaattcaaaaaacagtctctttctcaagctaattaaaaaatctggacttgaatcgccagtgtagtgtcgaagtacaatgatctcccatttggaagggagaatgggaatagaagaaaaaaagaacgcctacctaaaaagtggtagacgctcattgcatacggttattgggacaaatatagagtttatttctatcttggattatcctattcattaataactacttcatctcttctcccttttcattaaagatagcgatagcctccttgccctcgattaccaaaatcaccttaaagagtttcccttcagtcttttccgcaacatatacctcttggatcactgaatccggataagatttctctatggattgcgtaactactcccggaagatcctttacctcgaccttaacaaagtcatcttgattaacctcacaagcgattaccactgaatcaacacttgtctctgcggcaaatgcgctgaaactaccaatacccatcatcaatactactgcaactaatacctttttcatgactcttgatttttaattaaacaatctattcatattaacgtaatcaatagatatagaacaacggatatgccaaatttcgcctatctacagatagtcatgacacacaacatcttatattttagcattaacatatgaattgggatattacgggattttatgggacatttttgggtaattatgccccaaaagtcccaattcattgccataacccttgtaaaacatttgtgaaacaaattatctgtttttgagcaaacagagttagacaaaaacgatatatttagccatctaaattctattgaaagccagattccatgcggaaacaaataaaaatccgcatccagcttcacagctacatgcggaccaaacaaataacaaactctacttatatgaaaaaacaaatactactaacaaattattatacgatgactactatcaaggtgacttctgagtcattttatagtataacagaagattgtttgaaaaggttcaccagtaatttcttttagtctgagagcttttctttttatcgactgtttgaatataaccttaattccgcaacactattacaaatataactttttaagtacctgagcaacaaaaagttgctcaggaatttgccatgtcagatttttcacctatcttagtgttgcaaatcaaaatatgtatcaaacccgacagacatggcaaaggtagcaattaaatccgagaaactcactccttttggaggaatattttcaataatggagcaatttgactccagactctcatctgtaatcgactcaaccctcggtatgagatgcaggctgtatggttatcaatacagcgaaatcatccgttcgcttatgagcgtttatttttgtggcggctcatgcatcgaggatgtcaccactcatctgatgtaccacctttcgcttcatccgacacttcgcacatgcagtgccgacacgattcttagagccataaaggaactgacccaggataacatttcctacacatccgacactggcaagacctacgacttcaacacggcagacaagctgaatacactgctcctcaattgcctattgtccacagggcagctgaaagagggcgaggggtatgacgttgacttcgaccaccagttcatagaggctgagaagtttgatgcgaagcctacatacaagaagttccttggttatcgccctggcgtggcggttattggcaacttgattgtcggcattgagaacagcgacggcaacacaaatgtccgtttccaccagaaggacacgctgaagaggttctttgaaaggtttgaacaaaacaagcttattatcaaccgtttcagagctgattgcggctcgtgttctgaagagatagtggaagagattgctaaacactgcaagaccttctatatccgtgctaaccgatgcagttcgctctacaatgacatctttgccctcagaggttggaagaaagtggaattgggcggcattgagtttgagctggcctccattctcatcgagaaatggaaagggaaggcataccgtcttgtgattcaaagacagaagcggatagacggcgaactcgacctgtgggaaggagaatacacctaccgctgcatccttacaaatgactacgagtcttccgagaaagagattgtcgaattctataacctccgtggagggaaggaacgcatcttcgatgatatgaataacggattcggctggaacaggcttccaaaatcctttatgggagaaaacacggtgtttcttctgcttatggcactcatacgcaacttctataaattcatcatggcgaggcttgacgtgaagaggttcggactcaaagcaacaagccgcatcaagacgtttgtctttaagttcatctctgtgccagccaaatgggtcaggacatcaaggaagtatgtgctgaatatctattcatgcaacaatgcttatgccaatgtgttccagaatgactttggataacaccgacaacttatagtcgtgattttgcgtattgcctcaagtcgcatggtggggtaaggggcatttatatgtctttatggtgacattcgatgcactgtgccccctttttactaacgatgcagattcttttcgcttctgtatcatattaggcgcgtagttgcggatttgaggtataaaacatttcaagctgcaaattgttttacaaacaaagataaaaatgatgattgatcggtttgaggcatgattaagaagttattttctatattattgtttatgataatgctttttgccttccggatgaatgcggaagcggatgaggaacacttttctaacggttcctatcgttagcgcactagaattaacattaaatgaaagcgcttccgacgctatggttggtggagcggttactcaaaacgacaaatttcaagtaaaacacggcgattactcctaaatctttagggataatcgctttttcatgaatagatttcaagtaaaattaggacatttatccaattatatccgtaattttagcccaattaaatcaatagcaattatggaaagaatcgttaatcatcctattttaacaattccacaagagggagaacacacttttttattcaatggcaaacccgtaacgggaatgaagggttttaccatcgccgccgccttacatcaggccggctatccagtacacagtcatagcgtaaatggccgcaatcgttcgctgaattgcggtatcggtaaatgtggcgcctgcgaaatgctggtagacggagaagtaaagcgtatctgtattacgaaagtagacaatgtaaaggaagtatcggaaataacagtacagaattatacgacagattcccaaatagaacccagagaagaaccggtagagatctatcgaacagatgtggccatcattggtgccggccccgctggattagcttgtagggaaaccttaaaagaactaggcttgaacagcatcgtaatcgatagcaatgataagatcggcggtcaatttttgatgcaaacccatgcatttttctttttcgagaaagagcggcgctttgggggtatgcgtggtttcgatatcgcgaaaactttagccggagacgaccactctggtattttcttacattctacggtctgggatatcctacaaaataagcgtatcgccgtaaaagacatgcttaaccataaaaatttctatgtagaagctcaagccttgatagtcgctaccggtgcggttccttttatgccgaccttcgagaatgatgatgtgcccggagtttatacagcggcagtcgtacagaaaatgatgaacgctgaattcacgttactcggcaaaaacatattgacagtaggcgccggtaatataggttacctaacgtcctaccaattgatgcaagccggagcgaaagtcaaggctattttagaggcgatgccccatgaaggtggatttccggtacaagcgaatcgaattcgccgccttggcatacctatttatacctctcatatgcttttgaaagccattccaaacctggatcggacaggtatcaccggcgcggttgtctgcgaatgcgagaacttcaagccaatcccgggaacagagaaagtgatcgatggtattgatgtcattaatatatgtacaggattgattcccgacaaccaattgctaaccaaaggccaatatacatttggaaaacgttgtgccggcgtaggtgatgccgtacggatcggagaaggtactaccgccgtactaagaggaaagcaagccgcttatgagatcgcccaagagctaggcgtacgtttcaactacaacgattacttacaaatatctaaggaatacatcgactcccagcaacatccgatccgcatcaaggaagagtccccaaggcccactcccgagcgtcaagcccaacgccctttcgttcgcttggattgcttatacggtttcgcttgtaacccttgctctttcgcttgtcctcaaaaggcaatcaccaaaagctccaccagcgtaacgcccgagatcgattacgaaaaatgtaccggctgtatgcaatgcgtatcccattgtccggggctggctattttcggctacgatacccggaagcaaaacttattcttaccggtagaatacgaggtagaagtaggtgccgaggtgtggcttgtcgatgataacgggaagaaacaaggcgaaggtatcattgagaaagtattaaagaagccgacaaaaacaaacgtggcccgtgtgaaagcggcaggaatggaaaacgatgccttattgaatatcacaggattcatcgtaaaagaaaactatccggaggagatcgacttcaagcaagagccggagtgtgagtcggagacctatgtttgccattgcgaggacgtatctttggacgagctactttccgccattggggatcgtaaatatatctccgtcgacgaggtaaaacatatcacccgcctaggaatggggccatgccgtggaaaacgctgcataccccgcctacgcatgaaactaagggaaaaaggtatcgaactggtaggcgacgctaccccccgtgctcccctatctactcgcttcgtcctaggggaaatgtatccacagcgtcagatagcggatacctataaagtagattctggaaagcaggttcgtaagacggaagtcttaatcgccggcggaggtataggtggtagcgcattgttccgttattttgcggaagccggtaaaaagaccgtgcttattaatgcggatcgaggatcatcatggcgtaatatcggtggtggtcgtccagcgttctcgatccccgaattagcggagatcgcccgtaataaccaaacgatattcgaggagacacaaaaagaatacgatatccattaccgtgagatacgctatatcacgttcgcccacgacgaggctacctacaatgatctggaacgttcctgcggttggtccaacgcttatttgatcgacaagaaagactttcagaaagaggtatccccctacttcaacacgaaccaaaacacctatttcgccgcacaaatctcccagcattgttggcaagctaccccggggcgtgtgatagactttatacgaaacaaaggcaaagagcggcaaggtgaggtttgggaagacacacacctagtggaagtacacaaaaacggtagaaaatatcacgtcttattatatacgcatgataagcgatacatcgaatgcgaatgcgatcatttcgtgaacgccctcggttatagcgccgagcgtttcgcccgcatgctaggcctttacaccggcctctatccggtcaagcaccaagcgttgattacccatcgcctaccgaatctgggtaaaaacggggatatcctcgatatgttgatagaccgccggaaacgtaacgacttctccgctgtctacggtcagcaattcgccgagaccggacagattatcgcttgcgcctcccccgctgtcgacgctaaagcggagatcagcaactttgatgagttgaagtttaatacccgtcgtttcatggagatcatctccgaggtgttctgcgattggattccatcgttagccacagtacccgtacaagccacatggtccggttattatgtagagcctcgctacattatcgatccggataacggactattcgtaggtttgcaaggtcacggcttcatgctcgctcaatacttggctaaactatacgtagataaagcgttaggccgtaccgttccggattatatggagcgattgaggctcgatggagacggaattagtgagaaagctttcaaataaactataaataaaataaagcctcctctaccacaattggtaaggggaggttttgataaaaccaatcttttctattttcgttattctatatccataaatagtaatcatatgaatatagaaacaacagacaactctcctttgctacaggaatgtatagaagaattgatcaatagtaaaatcgatgaggggaaaggaagaaccgctgggaattatcgaagcgcatggaataaattatccacctttttaggtccgagggtaatggaatttatatttgccgacttaacgaccgattttcttcatcactatcttttatggttgatgcaaggggaagacgggaaacaggctcccttgaaaccgggtagtttggacttctacattcgtaatctaaagacaatgtacaacaagatcgcccaagataaacaaatggatgttccgagagaaagcccgttctctgacctgcagataaaggtcccacccacccggaaaagggctttgccaagtctcgacctacaaaatctggcgactcttgagcggcccaaaaacccatacgcctgtacggcccttcacttggctcttttcttattttacgctagaggtatgtgcttcgtggatgtctttaatctgcgcacagcaatataaacgatgattatatccactacgtacgtagcaagactggcgtagcgatgcaagtaaagatcacccccgagataaagaacatcatattctcttatcggcgtttcaataacccgtggatattccctttcttacacgagaaaatcagcggagagggagaagtcacggctcagtccgcgcttcggagagtgaaccgccacttaaagaaaatgggagagcaattacacttcgaacagccattcactacctatgtgatgcggcatagctgggcttccatgatgctggaggcgaattcggaaatcggcattatcagccaatccttaggacatatgtccctacggactatcgagatctatcttggccggatatcagtatctaaaatagacagggcctccgataatatgttgaacaatttggttcgcagctcttccacccgacaaagaagtaaaaataaggtgatggctttaagagacaatcggcaagaaatgcaagaagctcatttcctcgattgcctctaagttattctcatttatttaagatagttcatgcaggaatgccaaagggtagattcgtcaaggcattcctgcacagcccttagaatggatactatttctcttcaccaaaattaacggtattctcgacattgtccacatcatcaaagacagccacgttgccgtttgttatcgttacacggaggtcggcactattagggccggcgatattcaccgtcagcttataatgataatcttgatagatattgtaatcggtcaccaagtcaccccaagatagaatttatactatttatccgtcattctgagagttgtctctttctgcgtaagaaagagacattttttttctccatacttctttattctcaatcacttctgtttttcgattcattttacattatcgtttattttaccgtttgtctctttacatctcactactcatttaacatttaggacttactgtccgaaacggcacgcacgaggtagcacgattcccgacgggggaaccgtgtaaagatccatacatgcaaacttcatattgttacatgacgttgaattgataaggactaggaaatacgaaggcgcagacatcttgccgttatgtccgtgcctttatgattgactaaaccgtgatcgcaatattacgatccgtggtttaaatgtctaattgtttcgattttgtctatattcattaggtgtaaccccaaccattttcttgaaccaacggctgaaatgttgcggatatggaaatcccaattcgtaggatatctcgctgatggatttggtgacatcgaatacacgctctttcgctatatcgagcatcttctgctggatatgtttcaacgcagaaacaccggtttcctttttcagaaggtcgcttagatagttagccgacaggcaaagcttgtcggcacaatactgcacggtgggcgtacctttacttatgggaagattggacgcaagataatcatccagcgtttgctcaaatcgggctaagatgtcaagattcacattctcccgcgtttcgaattgacggtcatagaaccgctcacaataatcaagtaggagttttatattgtctgtaatcagtgatttcgtatgcttgtctatgggatggagcaattcttctctgattttgcacatgcagtcaataatggttcgcctttcctgttcagacaagtggagtgcttcattggcggaataggagaagaaactatagtttttgatgaattgggctaacggagtgttacgtaccagttcgggatgaaaagcgagcagccatccaccgggttgatgcaactgaccgtcatcgtcagaccccatgacctgccccggagcgagaaaaagcatcgtgccttgctgatagtcatagatgctacgaccatatttgagagtaccacagtccgggtctttcatcaagatagcatacaaattatagagtttcggacagaaatgtaccggattagcctcttgcgcatcgatgaccgtaaccagcggatgcaacgtttccataccgaaataatcgttgtattgctgcacagtgtctattctctttatctcattcatcttcaattgtatttggcttcgattgcaaagataaccttttctttcatacgtttctcaccgtccgatgaaattggttattatatctgtggaattgatacagtctacaccccaaataaccgctattttttcaataaaaacaatcgtttttttgtaatcggttggtagataagacttaaagagtataaagttcggtagccggtagcgatttggtagctgtgcgggtttcgctgcattgcttcgctctgctcttggaactgatgcaaatatagggattttgaccgaaaaagggaaatgtttcgggggattttttattttttcgggattaccggattacaggaaaagcataaaactggaggcggtgcaagaaacggggttgcacttgtgtttttactggaagtgtaaagtattgattttcagagtatattagactggtgcaaggtgcagctatatttatatatatagctgcaccttgcaccacctctgtatggtttgcatcctgtgtagattatcctgtcttcagatactcgaaatcgaaggctggttaccgccagttaaggtgctgccggtgttcccttcctgtaagagtatggggatgtaaaagcacggggcttgctgctactgaagggaaacaagaggatgtgcccaacctatggagactgtacggttggatataatggctgccataaccttttgaggtggcagatatggaaaagggacttgtggatcatgcagctgtcttttactgcaaggatgtgaaaaataaatgcttgtgaagggaattatccctgaaatcactatcttcgcaagtgaaaaccaaaggatataaaagtatgtttaccaacagggatgaagtattggaaaaggctttgcggatattcgcaaagatgaattacgagaaggcaagccagatggagatagccagaacctgcggactgtcgaaagcgggactgacctattatttcccgttcaagcaggacttgttcacggctgtggcggacaggtacgtgttcgatacccaacactcgaaaaacaagttcaacttcacggcaggctcattgtcagaatttatcgaccggtatgtagccggagtggagaacacgatgcagcggctcgtgcgcctgctggacgacgggaacaatcccaacgggtgcagcttcaacttctactattaccacctgctgatgcaggtaaggctgtactatcccaacgtggagaaaaagatagccgccatattcgagcagaacttacagctttggaaatccgccatcgagaaggcgaaggaaagcggggaaatcaggcgggatgtggatgtggatgaagcggcttcgatgttctggcagatattcttcggaacctcctttgaaaagtccttttttcaagggctggacaccaagaagctggcacggagcctgcacttcctctattcgctgttgaaagcctgaaatacaggcggcaggctgcataggacagcaataaatctctattagagggactttaacaaaataaaaccaaccatcctgttggtttttctgtttctttgtttatatttgcggctatatgatattatcttcagcgacatggataaggttcagaaacaaagaggaagcatcgtgctacacaaagaaacaagggacggtgcggactacatacggatagaatatgcgaacagtcaggctgtcgccctgctgctcgcccaagacacgggcatggaaatggctggtaacggctctgcatacatagcgtcagccgctttcagcctgccggatttttacgaccgctattcgccccacgcctatattgattacagccgggtttacgtgcggcatcccaaacccaaaagggaatacacactgccgaaaggctatctcgaactactggaacaaaagcgttacagcccctcgaccgtcaaaacataccgtgcctatttcagcgacttcatggaatatcacaagggacggaacatcgaccgcctgaaagtgtcggacatcaacaagtacatactctatcttgtgaacgagaagaagatttcggtgtcgcaacagaatatgcgcatcaatgctatcaagttctattacgagcaggtgaaaggcggcaaacggcaatactatggcggtatcacccgtgccaaagagtacaagagcctgcccgaagtgttgagcaagaatgaaattaagcgcatccttgcacaaatttccaacatcaagcatcactgcatgatttcgttggtttactctgccggacttagaagaagcgaattgcttaacctgaccccgcaggacatcaacagtgaaacaatgtcggttcgtatcatgggcaaggggaagaaatgccgttattctctcctttcgcccaagttgctggaagaactacggcactactttcgggaatatcgtccacaaaaatggttgtttgagggcgaaacacccggagagcaatattcggcaagtgcattggtgaaagtgctgaaagaagccgcacatcgtgcaggcatcaaacaccgtgtacacgtacacatgctgcgccactcctttgccacacacttgctggaacagggaacagacctgcacacgatacaggaattgctaggacacaacgacatcaagaccacaaccatttatcttcacgtgacaagcgaacacaaagctaaaatacccaatccccttgatatgctggatgattcgtaggatatactattgtactgcgagaaatgaaacagagtatagtgtatccaccaataccatattatgataacaaaaacaagtcatatcaaaagcgtcttgagtatctgcctgctgttgttgacagcgttattaccaacagtccgctcctatgcctcgggtgtggcagattccgtgtatttccacatccggctggacacactgggaaatgtccacatcggacaggtgctgcaactgacctatgcactggtcaactcctcgtccgctgtcccgttcgattcagttgcacccccggtgttcaacgccgacatcgaagtcatggagggaccgaaaccacacaaccgcagcagttatacctttgtggacggtgtagaaaaagtgacccgtgaaaccggcttctactaccttgtgcgcttcaagcagagcggcgagacccggattccagccgcatccgtgaaagtggggaatcagacctatactaccccggaatgccgtgtaaccgtacatcctcccgaagcagatttaagtaaattgcaatgccatctgcgtgtggctcaactgaaaaaggattttgtaaaatattgtgccacgttgacttgcaatgcccgtcccgaccagaatccgcccctgttgaccattaacggagagacagtccgtccgacaaataactcctattcgggttccgatggcaaggaggaatatgtttacaaatattatttttccagcaatggttataacgtagcctgtaaggaactgacctttggcggaattccttattctgtagagccgcgagtgagcaaaatagacaatgatgttttcaatcttattgtctttggggttgtatgtgcattgttcgagttgatatggtggcttgcctatcgctaccgttaccgggaggagaaagatgctgcccttgccgactttgtgttgaaaaggaaaaccttgcctcttatcatcgactgggcatacacccactatggagcatcgcacatgctgatgttggtttctgtgatatctctgagtgttatgggtataatgttctatacaaacgggcagttcgtgtctgcttttctctggtttggcggtgtattactgctgcttgcctatgtgctataccgaagtcaaaggcgcaagttggatttcagtagcatacctaccacactggataagcagtcgatttatgacaagatatataatctgtcggtgacttatgattgggacgttgaccactacggagaagattgcatcgtggcacataccaatcctgccctttggcatctgacatggggcgagcagatattcattgtgttcgaccaaggtcaagtgtgggttaacagcgtaaacgacctgaacaaacgcacttcgatatgctcatttggacacaacaaacggaatattcgaagaatcagagaggcattgacacagggtgcagttattagagattaggaaatgcacctgcggggtgttgtttaccgaaatatacagcgcctgacgagtgatcttataaatacattatcgtcaattattaaaaatataatcaagccgtgatatataataaatcttttacagtcattttagatgatttatcagagtatatagatacccatgataagcttctgctcaaagaagatatgcttcaattagcatataaaaattatatcattgatgttggattttattctaaaggatttattctatatgtgatacaagaccacaattgggatattcctataagaaaagagtttatccaagaaaatgatattacaaatggaataaacaaggcttgtattgaagtcttgtctattcgtaatgaacgataacaaggtcgagaaaacagctaaacgctgtccctcccctaaccattactaacaatagtgcgatgaataaaaccgtccaatccatattatcattgacagctttcagtgctttactgatagtcataacattattttgtggtggcttaggttttggtcgtttgttcgagatatatggcattatggaatattgttttttaggtttacttctaattatagatgtattgctaatctacaaggtctataaactatatgcaatgcaacctaaagcgatagtgttattgttgggcttggaatgttgctctattcttttgtggattgcctttatctgtatagaccaaagtttattagattggcaaattacaagcttcatattgcaaactgtcaatttagacggcttcgagggggatgaacgaggattgaatatgctcgcagtcttatgcggcattgtttatcctcttattgggattgggtgtttattcaccggattgggatttataaataagttagtaacaacgaaagatagcatctgacgatgctcctttctaaccattagcaataatacatagaaatatgaaatactatattctaaacaacgataaaaataaaacaggagttcctgtattattgaacgctgtactggctgaagaatttaatccccaaaatccaatgccacctatggtggggtattcgtggtgttgtgcctatcgcaatgaacgaatatatcccgatgaattgtatcttatatcaaaggatagactatatacatttgattatataagattttgggacggctatgtcgtttcttccgagttccttgaactcattaagagtttttcttcatttcgatataatattgtcaaactcaatgttataggttggaaaggggtaaagataactgataaaaaatattatttcatagaaatacctatatccgaatggatagatgccattgattttgaaaaatccgtttttatgttggatgattatatgttagaactgaaaggtttgaataaagaacaagtcatagctgaaaaaaactattttacgaatataaaggcttataaatctattcatatagatagttcaagatgcaaaaataatcagatttttcaagttcgtgataatatcattcaagacttgatatgttcgcaagagtttcttaacgaattagagaaatcaaatatttatggaataggtgtcattgatacaaattcttcatcggagtatttcatttatgattaagatattgctaacaaggtcgagataacagctaacgctgttcctcaccaaaccattaatggtaattctgacaaagtatgaatatagacgatattaaaaatatagacgactttcaagtttactgttgtacgaataacgaacaacggtatatctattctgatatggtggagaatgcaacaccgattgcagattgtatagacttatttatcgtttcaggcacacgtagtatggataatatcagcctatgcactaaattgcgttttttatctatcaataactacaagataggtaaaaaagaacttagcaatttgttggattataaagaaaatctttccacgattacacatttatatttgtggaacacgaagttgaatgatttatctttattgcaactgtttcctaatctgacgcatctaatggttgcatatatcagaaaagaagatttttcatttgacggtattggttacactcccaaactacatacactttgtatattgagtgcaaacaagatagccaatatggattttatacccaatgatttgaagaaacaaattaaaaatctatcaatggtatatacttcaagattacacagcttaaaaggtattgacggctttatgaacttggaaaagctatacttgtctgcatcaacaacagagagtaagaaaacagtaaacttgactactttgtccggattagaaactttgagaaagctaaaaaatattgagcttaaatattataagttagatttggaagatgccaagaaaagactttcttcaaatcctgctttaaggcttttcaaagtgaataatatcaatataccattaacgaagcgtgataacgcctaacggcgttccccgcttagccattactaacaatagtgcgatgaataaaaccgtccaatccatattatcattgacagctttcagtgctttactgatagtcataacattattttgtggtggcttaggttttggtcgtttgttcgagatatatggcattatggaatattgttttttaggtttacttctaattatagatgtattgctaatctacaaggtctataaactatatgcaatgcaacctaaagcgatagtgttattgttgggcttggaatgttgctctattcttttgtggattgcctttatctgtatagaccaaagtttattagattggcaaattacaagcttcatattgcaaactgtcaatttagacggcttcgagggggatgaacgaggattgaatatgctcgcagtcttatgcggcattgtttatcctcttattgggattgggtgtttattcaccggattgggatttataaataagttagtaacaacgaaagatagcatctgacgatgctcctttctaaccattaatggtaataaggtatatgatagactatttatattataggttttatagattatggcttcattcttctgtatcggaaggagccacatttttggcaatgcttttgttttcggtcatgttaagtacaaatgtattaaccgcatggggtatattaacccaatacggaatcattgattatccgtccgatactcaatactatatcattgaaggcagtttaatagcattgctgtgtggcagatttttcttcaagaaaaggtacagaagaattataaccaagtatgaggatgaaaactctgtgcaacgtaaagttggagtgtgggcacttactgtatatatagtggcaacctttacttgctttttcatagaggcattgcacagacagggaaaaatataatttaccattaacgaagcaggataacggacaagccgttccctgctgaaccattagtaataaatagcacaatcaatatgtacgaaaaatttttagataagagcctaaacagcactcgccaaacggtagatgatacttttattgcaaaatatgctaatgcggtatcagaaaaaataatcgaactttggaaagaagttggacttggaacgttttgtgatggattgttcagaattattaaccccgataaatatcagacaatagtagatgatagttatcctctgtatgagtatgaaactgtaactccatttatgacaactgtttttggagatatttttgcttatgttaagaatcccgtgataggagattatgtcgtattcatcaatgtgagatacggaacattcaagattttatccgagaatgttgatatactattgaatgtggtaattttcaacaagagttgtttggaatcatggttttccttaaataaatatcctatgataaaatcagaaaagggtgttcctacattggatgaatgttacggatatgtcccagcattggtatcgggtggtatagaatcaatagataatatcaaaattctaaaagctattccgtatatagaaacggtactccaatttatcggggatttgaagcgagtgcgatagaatatattactaacaaaccgggataacgcttgacagcgttccccgcttagccattatcaataaaagtgtgaaatatggataaaaatcaaatattagaaaaggttggctggagaataaaagtagaaccatatttacaatatggaatatcaccacatggaataatattaagtatgatagatgatttatttttcaaagaaatagaacgtacaatcgaagacaatcaccttccatttcagaaaatagaagatgccgataaagagattttggtacaaagattatatgacacttttgtaattggaaacccttatgcattatggttgagttttaagtatgtgccatatagtatcgattgtaacatggaagacccttactttcatctattggatttaatagatagaaataccgttttctatttcttcattgattatgagcatattggatttgtggtttacaaagcaaaattgtctgatatacatatatttattggtgattgcgaagggcttgacgaatattatttagtaacagaggatttcatggagctgtatagtataacagaccatgatgatttgctttatattgacgtgagaaaaaatgaaatgagaattgataataaaccgggataacgcttacagcgttccccgctgaaccattagtagcagttgaacgaccaataaattataaaagatatgagtaaagtttatatttggattggacagtttcattcaaatgctgaatttgaaacttatatagatcaatcaaaattccgtcaatggtgggcagaacatgacgaagataatttagagttaagttgtcaattctgcaaagaacttaatatatcaagttatgatgaagattttttggtaactaaattttcagcatgtggtatagatgaattggttaaaatgataccagctaaaacagaaaaagtaatgcaactatgtaaagagcaaaacatacaaaaagcaaatgctgctatctgttataatactggagaagatataacacgtacacaggcaaagaaggctaaaagtatgtttttcttaggaacatttgattttcaagcagacgaaatagaaggtatatcaacttccttagctgggttgcgcaatttaacttgggttggaataacacataaaagtaaagatgaatttatgcaatacttcaatcaagatgaatatcttgaagaattgcgtaaattcaataatggagagacaaaaaagcatccaagtccaatgttaagatgccaattttgtaaggatttaggagtaaatttttactatccagaatttttgtacatagaatttgcagataacataattgaagccaaagaattagtaaggcacgttattaaggatgaatttttatatgatgcagtagattttactttggaaaagcaaaaaattagaatggcaaattgtgcgttctgctatatccctaatggctttcgtgataagaaaaaagaccaaaaaatattcattttcaaaaaggaattattcagcaacgggaataaacccaaaaactatattgaagaattggataattataatggtcttacttttttaggaggatttatgtgggattaatgaagctactaacaagccaagttagctgctaaacgcagctccttgtcaagccattaacatcaaaacagtgtaccataatggaaacaagagataaactttttacagaagaacagtatttaaagcaactgaaattgtataatgaagaaattctttattatgaacaaaagcatctttcaggtaaacatataggttacgattctttgttcaattataggcttcgttctttattggtacagtattctatgggacaggatattgataatctgaaaaataattatgtggaaaccctcaaaacgatgccgagattttggacggataacggattttatattgaaatgttatggcttctgtcaataggcattatgttggattacgaagacaaccttatacaaagtttggttcaactgataaaagacagagaagcaaaagactatatttatgacaccttgattagatacagatttcttgattgggaaaggacaacaaacaaagtattatatccgtcaccctatcaagctgctatcactgttacagagttggctgaacaagacaaggcagaagcgatgaaacgattagaaaaatacctcaaaaaagaatggtatcgaggacattctgatttatcttggcatgacgaccataaatatggtatcaaccatgacggttattggtgttttgaaagcggtgcattggtcaaggtcttggggctgaatgatagcagcctgaaagggttgccctactatccatacgacatggtacattggaatgacaacattaaataaagaaaaggtatgagttactctgtttgtgcatatttgatagaagccgataaggtaaggtctgtttacggggcttgtgataatcagcttataaaccaattaaaggttgcgttgaagcaggaacttgacagtttgaacgattctttcagcaatagcctaaacacggataaagatgcctatgcggtattagcagacattgtgaacggaaaaatccgttatcccgaaattgctttcatgtacgggtatgtatatgaaaagatttgcaaccattatggaacgcaaatctactgtgcggaaaacctttggcaactggatagtcaaagtacattcatccctattccattgagcagtgattttccctatattatcagcatacccgtttctgaattggagagtaagcggacggaatacacctcgctgaaagagggtaacggtatcggagattatgactatgagcaggaaatggacgacctgaatttcattttcgatgaagccattgaagcgcaaaaagacctcgtgattatggtttattgatatggtacactggtgtgagaataaatatgatgttaacgaagcgtgataacgcttacagcgttccccgcttagccattaacgataataaattcagcaattatgaatacggaagaactttatatttggaactatgggattgataaactgcctaaaggattattggagtttggtaaatctgatgtctgtgatacttacgatgaaagcaaaaggcagaagttccaaaaccacgggcaatggatgtggaaaaacaagaatggatgggaagaaaatttaccaccagtcttatacctcgtatgcaacaaaaaaccgggaatcttgcaatttgattttcttgaaaaatacagcataaaactcaaaatcgtatcggaagagtttttgtctttacttcaagaaaatgggttcgttgataaatatgatattactaccgtcaaggtagtaaacaagaaaaacgaatctctgacggataaaaaatactacgctttacgtataaatcattttgataatgattcttttcatttcgggaaaggcataacatatcagagtgactttcagaaaaaactaggtacttgttttacagtatatcctgatatgaaactgaaagacagttcaattaaacagaatttcttcgttttagatagcatagaatatggagatggaataatattccgagagagagttttggataaggtgttgaatctgtatagacctgaaatttataaattgtcagactactccaaaatttggaataacagaggcaattatctatatgggaatgaactaatgattgtgaaataaaatcgttaacaaggtcgagataacagcttaatgctgttcctcaccaaaccattaccaataatatagaatagatatgggaacagaactaaaagaaactatacagaatttattgcttcaattcatgcataatatgcacgagtgggaagtgatgtgtaatgatattgacaagcagagtgaactttcatttgaagaacagtttaataagaaaaaagagttggtatcgaaaatctttttgacttactgcacttctcgtgaacgcaagtatggcagacctactactatatcttatggaaatgaagggtcttatgaatatgatgttaatgaagagaaaattaccgatattgtagaagaagggaaaaataggattgcagttcacacatatagggaagtgcctatgcgacaaaagaagcaatatatattcttgtattcaaaaggaaaatggcttttagactcaaagaaaagatattctgtattgaagcaaaaatggttatctgaatccctctaaacaataattggtaacaagccaagttagctgctaaacgcagctccttgtcaaaccattagcaacaatcaaaatcattatcgttattatggatatagaaagaatacttaaaacaagagaaaatgcaatatactacggcattggtgaataccaaaaagactgctttggttgggttggtggaaatgctccagcttgttttgatgataagtatttatcggacaaagataatctctatttttatctaacatttcaaaaccctttaaatcccaacaagcaaatatctattttcactccggaatttgatgttgcattggaatataacacatatcccgattgtaaattgttgttggttgaacatgaattaagtagccaaagcaaaagtgatagatataaacatcccgaaatagatgaaatttattcaatatacgaaatgagtacagaaaaagatatgcctgaaaaaaattgtgcaatcaaatttgggggtaacgtaatgcctattcaatggggattagataatgatggtaaagtggttaaagatggaaatagcttcatttttcaaatcaacgaaatttgcatgaaagatatttccgttttcatggctggctgtatatatgtttatggaaaaattgaaggtaataaagtcacaaatccatttgtggcatactgggaatattcctaataacgataaattgattaattatttcaaataggttgctaacaacgaaagatagcatcttacgatgttcctttctaaccattacagacaacttaatacagaaatatatggaatatataccggattatctgaaaccatttattatacacaaagactattttcctgaattgatagaagattcatggtttaataatcctgtgtattggaaaggtaggttaatatccccacaaaacgaaacaaaattcagactttacttttgtggtgaattaattgataattccattgcaggcaagcaaaatttccctttggctgtatatgcgtattcagtagattcaggagaaaagattactcttttcgatgaaaggtataatggatatgaagcattactaatagaggataagagagaactaccattatctcctgaaattcaatttgtagataaagatgctgaaacagaatttgaaattatcattcttggatgcagtaataccgatttcgatgatgaatacccagccaccgaacaagtacaactaatcaacggcgactgggtaaacaaagagtatctaaaatgtaatgcttttgatttcatttccatacttattcgcaatgccaaaggtcaggtatataagatattggaaatggaattatgttagttaaatcgtctgtaacaaggtcgagataacagctaaacgctgttcctcaccaaaccattaccgataataacaaaataaattaatttcattatgggactatttttaagaattacatatcaatcgcaaggaggtagaacacctgaaacagcatttaagaatcaaaagattttagatgaaattatagatggcttaaacgattttgattggcaagaatcaaattcgaccaaactaactactcttgatcctcaatatagtcatattgcaattggcgcaattcttagatttttcctttctgaaaatatagaaggtggcaacttaaaatcattttacagataccttaaaaaagatgataaacttataatagaccaaatgctcacaattgacaaatatgataacttgtccgaaattgaaacaagaaaggcactttgtgatgatatattcctatatttcaaagaggttatcttgaaatataaagaacgttttcttgattttgatgctgttgcttttatcccattgcttgaagagaggtttgaggaaataaaaaacggtaaaatagtaagtagaagaaaatatgaacaatggtaattatagtttatcagagaaggcgggtaaatagctttatctcatttcttcatcgaaattttataatatcaaaatatgtagaatatatcggtaataaaacaaaaaaatatgaacgaacgatatgccaaatgtattccattcgataagaatgtaaaaggcaggattgctggcaatccacctaaatgtatagaagaacaaatcccttgcgattataaattctatgcaacactggtacacccggaaaaggaagataagatgctttctattctgatacatgataattttgaaattcttatagagaataacatttatccttcgatagccgtaaaggttatagaacacgagtattcagacataggtactcgttcagagaaaagcatcaaagaattatctgttaattctattagcaattattattacccacaagacagtgattttcaatttatcaaagtgggtggtgaaccacgttttattcagtggaaagattactattatgaagaattggaaaaagacggatattctttctttttacaaattgatgaagaaggttatagaaaaaatatggaatatgtgtttatgtatggggctttgttcttatacaagcataatgtaacaggtaatattattgcaggattttggcaatattcgtaaaaatatatcggtaacaagcacctattccgcctaaaacggcggcaagctgcaacccattagcgaaaatagaaaccagcatgatacagcaagtagaaaaactgaaagaaataatcaatcaaaacagtatggggcatttgcctttgccctaccgggttgatttgatgaaacgaataggcaatgcacggatagtacaaaaaatattgtgcgagtgttgcaagaaagcttgttcttgcttttcagaggaatttggtgcggaaaacctattatacagtgccttgtttgaaatagacagttatctgtacaagaataagggcactatcgaaagcatatcggtttcgatggaacggttacgtaattatgcggaacaatccattgagagctgcgaagatatggcagggtgggcaatcatcgctttagggtatgctatccaaaatgatgctgcttccatattggaaatagaggattataacggtgaagatgataatactttcgactttgaaagttggaatgtggattttatatgctcgatagcctattcgggcagcaaccctttcgtggaaattggaaatgtggagaaacgcaaggaatattggctgtggtatgcaaaaatggtaggggaagttactcaaaatcctaatatcgagcatttactattatctgaatacagaagcggaagctcttcaattgatatacccgcacgcaatcaatttgacgatactattgaagctcaatttaaggatatattattttatataatggattgtaaatcccaaaagttaaaggaaggacttgaatataatatattatttgtttcatgtgtagttgatatgtttagcatcacttcttctaaaggagatataataacattaaatacaagaaatacagataaaatctgtaatgcgtttagaaatatacgtgaactaatgtataataaaagctcaaaacaaggtgcatggtttcaagttgaaatgttcttaaaaagtaaggctcaatatactctcaagttcaattatgataaccttgagcaaattccttctttttttcagaaacctgattggttgttggagatgtttagggaatatcctcgaagcaaagaatatacacctctctggctaagaaaaatagttggaagaagaaagctgtatctgacttagtttctatgagtatataaaataatttcgctaacaacgcaggataacggacaagccgttccctgctgaaccattcaaggcagataccacctaaacggtggtcctttccagacattaataataaagataattaaagtatggacgatattacgaaaaaaatacttgaagaacttgttataaattttatttcagaaatgaatgaatgggagaagtattgtaacgagtttgacgaagaccagttagaattggacgaaacagagcataagataaagcaaatggttgcttctatcattagtaaatattgtacagacaaggaacgaaaaatgagccgcccgaatgctttgtcatggggacttgaaggaagttatgactatgatccaaataaggaaaaaataatagatatacaagaaagcaggaaaaataaattttttgtgacaacacgaactgatgacgaatatctacagtatattgtcgtcaaaaaaaataataagtatttgatagatagtaaaaaaaggaaattcttaagtgaggataaatggagtgttgattatttataagtctaacaaccaactttgatgtttactataataaactctattattaacaaggtcgagctaacagctaaacgctgtccctcaccaagccattagaaacaattagtgcgcatgaaatataacaaaaccataaagtcattgataagaaagggcttggatgaaatcaaccattcaagtacgggacatctgtccttatcaacaagacgtaagttactacaaactatcaatgaaccttatatcattggaagaataagtattttatgcgcattgaaagtatatccgatatggaatgactttttcaggaatgatacggaaataatcggactgatagaaaaaacggaaaaatacctgctgggacaaacgagtaaaaaggatttgttgaaagatgccgaccatttggacgtgtttgccgataattacatggaagatgatataacagcctcgtttgcagctaaggtagctgtttatgctgcttatgatgccgattcaggtgcaaacatggttgtcagtgattatgattctgatgaagaaatagaagacccagatgaatgggataccgctttccttgcaagtttagtgtataatggcggtattgttgattgggactctattgataataagcggaacaaagagttttggaactggtatcttgcagaatgtttatcaacagcatttgataaagataggatgttgacaaaggactataaaattgagcgacctatatacaatgctcctgaacaggcaagaatacaaatacatgaatatgtgaataatgataaagttatgtcattattcaatcagttggaaaagattttcactaaaatattatctgacataaaaggtgatgctttgatttttgatgcttatatagttgctgaatgcaattatgctaaagtttcatattataaggaaggtgtaatacatgatttcgaattaagcatttatgtattactgtatatcaacgagttcataagggacattaaaaatgaaatgtatgagaaccaaaaagaggaaggaggattttatgaactgaaaatgacaatgaataaaaacggtgattttgtaaaagagttcaactatgatataagggtggaggctctacaaaaaacatttcgtgattttgaatttgcaaatgattttaagatatatccaagaacgaaaaaattcattcctgattggttggcggatatactgaaaaggaaaagaataagtttctaacaagccaagttagctgctgaacgcagctccttgccaagccattatcagtcattaaaacggaattttaatcatgaaagcgaaactgaaaataataaaagattgggagtttggcggaattgaattgtctggcacttctttcaaatatagtccacttggcggcaaagggatgatagctcgtagcgaagaggaaatagtattctctgtttatcattcacagcaaaagtcgaaaggagtgctatggataaaaggagatatttcccgatttatccccagtccaaagccccaagaagtgcaagacatttggcaagaccccgtacttttatcttgcaacaacggaatattatttctttgtggagccagcaaaactctttggtggttatctgaaataaatggcgattggacttctatttctatggataactggtgtgccggaggcatacctatgccaatagctgttaccggagagcatggtgtatttcctattgtatgtagagtagatagggttttggaagcaacgaacagtttcacaactttgactgtcaattttgcaacaaagactgcccgttggtctgacattggttcttgtgtgtatagcaaagctggaactcggcaagcacatcttgattcggtgacaaaagcgaatggagatttctccaaagcagttttcaattataactatcctctgataggttctatgcaagaacagactggacatttatatgcttttttggaaagtagcacaactaatccagtaggtttggctggaatgggatattattggtatatagagttggagtttaacggtttgtttaaaaataaattgtggggtaaagacaatttaagccgtttgcccggaaaacatgggatgcgaggtaaattctctggggatagaacttggctaattttatcttccattttcaaaacagatgagtggaaaggcaagcaaaaactattgcgcctttctgattgtactttggttgacctcgttatgcctcgtggatatagtgctttccgagtgttagatgtttggaataaccgggcatttatctgtaatgaagataccaagctggctctttgtgaaataatatgggagtaagtaattataaatgttgataacaagccaagttagctgctgaacgcagctccttgtcaagccattactaacaatagtgcgatgaataaaaccgtccaatccatattatcattgacagctttcagtgctttactgatagtcataacattattttgtggtggcttaggttttggtcgtttgttcgagatatatggcattatggaatattgttttttaggtttacttctaattatagatgtattgctaatctacaaggtctataaactatatgcaatgcaacctaaagcgatagtgttattgttgggcttggaatgttgctctattcttttgtggattgcctttatctgtatagaccaaagtttattagattggcaaattacaaacttcatattgcaagctgtcaatttagacggcttcgagggggatgaacgaggattgaatatgctcgcagtcttatgcggcattgtttatcctcttattgggattgggtgtttattcaccggattgggatttataaataagttagtaacaacgaaagatagcatctgacgatgctcctttctaaccattataaacaatagtgcaaaatatgaaacagaaaatataccatatcattatctttttactcttttggttttgtggagtagcctattcacaaaatcccaaagcggatattttgcaacaagacctttctggcttgtttgacaattcaagcatgattggcatattagaagaagattgtagccgaattgacattcatattaccgatgctcggaaaatggatagtagagaatatgagataattggtatcagtcgtacccgattgtccgtaatatgtccgtttaagggaaaggtttgtatagatagcatttcttcctgttctcaaatgataaaaagtgaatatacggaagtggacggtttcatatacgggcattactcgtttgcggaatatggagataaacgatatagcggtacattttccggttctttcaagcaggggtatcggatgagcggacaacaaatagagaaaggacggaatgaaatagcagaactgaaattgaacttatctgaatatcggggtaagtggaaatccgcaaagggactgacaaaagtctgttcttgggcagatgagattatacccgatactcctgcaaacttctgcctgtttaatgatgcaggcgaatggattgtatcaccgaaatatcataagaacggttgggaaaatctatataatgcctatcacaatgagaatctgacaacggacgagatacaaaaggctcgtgaggtggaagaacaggaatggtgggtaaataaaagccaatcatgcaaagtaaattgagtttataacgaagcgtgataacgccttacagcgttccccgcttagccattagcgataacgactaaagttatagacatgaaacatatacaaatggtaataatgatgtgtgtgatttgtataacagcaagttgtacaacgcaaaaggttgcatatagagaaaggtttgaagaagcaaaaggatatgccctttatgcttgtatcgcacacatgaacaagtttgttgatagtacatcagttatcaacaaagattattctggcgaatattttgttcaattaagcagtttatcgctggaagaaattatcagaattaaggaatatgtggataaagaatgtatgaattattggagtatatcacacaatccggaaggtaatatgattgcatattcatcatggaaattctataactccaaagacttggataactttatccgtaagacattaaggaaaaatatcggtaacaacgaaagatagcatctgacgatgctcttttctaaccattaactgtaaaaagacaaaaaatatgaaacagaaaaactatataattaaattgttgctgaaaacatggttgggtatattatgcttcagtttgttatgtaccttttgtgccgtatggttattgtttcaaaatacaaaacaatcatcatatgataatataaacattgcttatgaagggatattattaacttgggctataattggagtaataatgttttcagctgggacaatcacattgtttatgaactacttcccggtaatcagatataataatatatatcgctttttgtcattttttcttgtacctatgttgcttattttatggtgtggtacagaaatactttgtttgtggactgttgcaataccatttatagtctgtttatctggtgcatatctattgttccgaaacaaaataaagaatacagctgacagcgcaggataacggacaagctgttccctgctgaaccattaacattataatcttccaattatgcgattaggcaataggaaaataatactttatactggaacaacagttttgctgattatgataactgccactcgctgtcttgattttttcttcttttttaatgaggacaatagaagatatacaataggcacgttttctggcataggacattatcgtggtacaatctacaagttcaattacaaagtggatgattcaatttatattgttgatacaaggtttggactacatgataaagatttgaaaaatctaagattggttgtcaaatattcaaataaatgggttgaacattcagaactacttgtagaggatgttcctaaatgggtacttgcaccaccaaaagacggatggaaacaattccctcctgatataaactggaaaggtgcagagcttgataccgcctatatgaagaagatgaatttggaaataccataatttgatgagaataaaaatcgaatgttaacgagataacagcttaacgcagttcctcaccaaattataaacagtattgattgaaatatgacgaaatataaattattgtatatagttcttggtatccatatcttatgtggaatacttggtttgatagtaatatgttcagttccagaaacagatcatatacgatggaatatcggttatatcatcggatatattttcgtgttatccttggttctttccatttttatacacattcctaataaagcacccgaagggatcaaatatggcatacgaatatatagaagtatctatttgctcagtattattataagtctattagttcctaaaggactatttatgttgttgatattattcattgactattcaagcaattccaagaagatagctgaagacgaacaatatataattcgtcattatgtcacggcatcactatttgatgactttaatgaaaagagaatatataagaaacaaggaattgtagagaaatatattggtagttttgatggtagtgatattattccacataagaggcatgagatacattcttttcatatagatgagagtaaaaatgtatttataggacattatcattcattacttaatgccaaagatactgtcatgtcttttcctattgtaaaatctaataattgagtttataacaaggtcgatacaacagctaacactgttcctcaccaaaccattaaaacctctaacgatatggatatattgaaaaaactgagcaaatatttcatcatcgcactcaccatcctgtttgtatgctcctttgttgtgcttgtcgataaattccacaaaatcgaatacgatgtgtttgatgtcttggaaacatacaaggctttgaaatacttctttatactgggagtaacggcttttacggcttcggtagtaaacagcataggaattgccgccttgttcgcctttaacaaactgaaagtacagacatggaaagaatttgtctgtaagctgggaaccggactactgcttgtcattccgctgtccgctatggtctattattgcgactggttcgtctatccccaaatgaagaaggagtatgtccgcttgaaactggaaatgacggacaatgttccaagagatattgaaaataacaacacatatcatgtctactttaatagcatcaaaaacgatatgcccatgctcctatcgaaagccagacttacatacaaactggactccctgaaaaacgctttcgatgccgctacggacacttgcagtatgtacctctccatgctgcccgatacgatggcagcggaagcatccaacaaatatcggttgggcagcatgggagtagaacttacctgcgcatcgcaaccgacaacaagcaaggacagcctgatatatatacaaaaagtattactataccattatgcagacgaggcatggaacacgcaagcagagatacgtgaactcaccaatgaatacagcatcaggacgtgccacacaatatgtctgtatatttcctatatcctctgcgcacttgtcattttcctgttgcgacgctataacccgataagaaagatactggcagtgctggctgtcctgatcgtgctgtcctatatgtataaggtgttcggagaagtggtaaaagaatctatagaagatacccggtcaataccccaaaaagtaatagggatgaaaaacagatccgttttaaatgagaggctggagattgaagattaaaatatatcttatcctccttcctctgccttccgcccgtcctcgaaagcgatggtcttggcaaggaacatgccgatgacgaactttgccccatgcgctatcagcttgcgccgcagtgctatgaaagtagctccggtggtaagcacgtcatccacaagcaagacgcacttccccctgaaccgttcgggatggaactccagattggcggtgcggtctccgttctcgtgcgtgcccttgaattgcgcccggtcataagcgacggttatcgccccgtacccgtcggctactcccatgtccgccgagagcttgcggcagaacgcctcgtaccgggtgcggtgcttctcccgtgtggatgccgggacgggaaccagcacggcacggtgcctgttctcctgaatcgcccggatgcggctggcggcgatggagaagagcttgacgaaaaggtcggtctgctcgccgctcttgaaacgccaaacggcgttcgacaccttcttcccctcgaaggtaatcttatcgttccggcggacggggcaatagtcataaaggtataaacacaagctgccgtccaagcggaagaaaccctgaaagcggttgtcaagcggaaagaacgccttgcggaagtcattgaagaaagtgaagacaaggatattgttccagaaacgtgcctcgtcctcgctgccggaatcgagcctgtacatgaagcccgccaagttcccgctctcatacaagcccatgccgatggtcaggcggctgttgaagtcggtctggctgacgatgtaccagccgcaccgggcgaaatgctcctcgtagccggaacgggtctccagcaggaaatagaatttgccgtcgtcctcgaaacggatgacgtactcgcaacgcaggcggcgtgcgatcttgcccaagatgcggctctcctcctcgatgaccgcaggagtggcaaggaaggtgtattgagcgataaagacagcctcgtccatagtgatgatgtttggtcggttacaaatatgcgaaatgtccggcacacggcaagcggaaagggcggaaaatatgcggaagggcgtgcggatatgtagagcttctccctgcttttcaccgcccggaacgtgacaaggctacaaacgtgaagcaaaacgaggacaagcggtacggttttgatacacggacatatacagaccggtatatttgcagggaagtataacaataaaaacatatcgggacaatggaaatagtaagcatcgagaaaaagaccttcgaggagatgacggaacggttcggctgcttttcgcagcacgtgagagagctttgcgcccgctaccgtccgcccgaaaagatgaactggatggacggggcggatgtgtgcgagaaattaggcatcagcaagcggacattgcagacctaccgtgaccgggggctgctgccgtacagccagatcaaccacaagatttactaccggacagaggacgtggaggcgttcgtggaagccatgagccgggaaatgacggaggacgagtgagatggaagtgatcacaagggacacggaagaggtacgggcatacttcgaggcactggaggaaggcatgaggtacctcgacacggtaacggcgcacttccgcccggcgatgaacggcgaggtctatctcacgggcgaggacgtgtgcaggctgctgcacatcacgccgagaacgttgcaggactaccgcacgcaacggctgatcccgtacatatcgctgccgggcaagacgctctaccgccagtcggatctgctgcgtatgctggaggagaactacgtggacatgcgcccaaagcgcaaacgggggaaaagtccaacataaacgcacgggggtgtgcatcgggaaatgcagcaaaggcagggacaccgcatcggaagttcctgcctttgccgcattctgcaccggggaaaggcgtcaagccgtttcccggagggagcggcgcacccgcttcccgtcctgtttcctgtccttcttctccagcacgctccgctgcatggcggcaaggttgccggagatcgcccggaaatcggagcttaccatcctgttggtcacctcggcgtagatctgggtcgtggaaatgtgcttgtgcccgagtatcttggagagcgcctcgatggtgccgccgttgcagagatagacggtcgttgcaaaagtatatacagaaaaggtaattattagcaataagaggtaaagcgcagataatcatatatgtttgtctcttattgtcgttagctgtcttcccttgaaaaagaaaaaaagagcgtattcaggcagtagttctgttgcttatccgttaccctttttagaggtcagcaacaggcagaaaaacgaggaattaggacgggcttctgcaaatcggctcgtttctctctttccgctgtccttattagacctttgaacggtctgtttgtcagtggcttgcatcatttcaaataactctgttggaagtaattttatcaacttaaaaaacagagatatgaaaacaggtttgaaagtgcatttctatttaagaaagaccgatgaaaagaaaaacggtgagtgtcccgttataggaaaaatcaccatcggaaaagatgttgcgcagttcagcgcaaaagttaccgccaaagcatccctttgggatattgtttcgggcagggtaacaggcaagagcaaacacgccaccgaaataaacgccacattggataaaataagcgtggcgataaatacgagttaccgcaaattgcaggaaacaaaaagcactgtcacagcaaacgaggtaaaaaacgcttttcagggtatcgcatcccagcaggaaacactaatcaggtattttgcgcatcacaatgaagaatttaaaaagcgtgtaggcgtgaaccgtgagttatccacacaggtacagtatgaaaactcattgaaacaccttaaaaggtttatgtcgctcaaatgcaagctgtcggatattccatttacacagcttgatttctctttcatcgaaaaatacgatttttatctgcgtgtggaactgaaattaaagcccaacacgatattgggcatcatgcgccatttgcgtaaaatgattaaacttgccattggcgagggtattataacccgtgacccgttcgagggctattcacccgaaagaccgaaagccgaacagaaatatctgacccgtgacgaattgcataagataataaccacgcctttagaccatccatgcaggtacttaacccgtgacatgttcctgtttgctgtttttaccggactggcgtacagggatatttgtaaccttacagaaaagaatattgtcagggcttccgatggcgtgctatggatagaaaccacccggcagaaaaccggaacgccttgtgaaattcccctgatggaaatacctctgcaaatccttgacaaatacaaaggtttagcccctgactgtaaactgctaccaatgcaaagttgcggcaggttgaacaagaacctgaaagttatcgccaagctgtgcggactgaaacggaaactcatcttccatgccggaagacatacttacgcatcggaaatttgcctgtcgcaaggtgtaccgatagaaaccgtaagccgcatgttaggacacagggacttgcgttccacgcagatatacgccaaaatcagcaatgacaaaatatcggaagacaccgacaaactggaaaaacggataaaggataaatttcggttggtcggtatagggcaataaatacatcactctaaattactatcaatatggaaaagaatacaaaagccaaaagaagcacctttgccgttctgttttatctcaacacgtccaaacgtaaaaaagacggtacttgcccggtagtgggacgtataacggtagatgcgaactccgtacagttcagcacgaaaataaacctttcttcccctgattgggacgtaaagaaaggacgggcgaaaaaagaaagaaaggagctttccgaaataaaccggacgcttgaccgtttggaaaagcaagtaaaagcccactattcccgaatactggaaatagagggatatgtaacagccgaaagggtaaagaacgccctaaacggtgtaggtgaaaaggcatcgaacctgttacagttatttggggaacataacaccgaatttcaaaagtgtgtaggcgtgaaccgggtttatgatacttactattcctatttactgacgttcaaacatctgtctaactttatccgcatgaaatacaattcggaagacgtgccgttaatcagcctgacacataagtttataaatgattttgatttctatttaagggtagaaaagcggatgcaggcaagcaccgtcttggggcacatgatttcactaaagaagataattacccgtgccatcaatcagggaacactaaggcgtaacccgtttatgaactacgtagcggaacagcctttgaaaaaatacaggcatttgacggaagaagaatttcagaagatactcaccaccccgatagcgtctaaaagatactcccgtacaagggactggtttgttttctcgtcttttacgggtttgtcttatgcggacatgtgcgccttatcggtggagaacctgacaacggaacaggacggcagcacatggataaagataccacgccaaaaaacagggattgtatgctgcatcaaactgttaagcattcctttgatgattatagaaaagtacaaggacgagcggaaaacggacaaggtttttaatatgataagcctttccaatatctgcatcaatctgaaagaaatagccaaattatgcggcatagaccggaatttgacctatcacatggcacgccatacttatgcgacacaaacgtgtatctcacagggagttccgatagaaacactctccaagctcatgggacactgttctattcaaacgacacagatatacgccaaaatcactaatcagaaagtaaacgaggacatgaaaaaactctttacccaagtaagcggtaaataccaagtgcttgaaagtgacattacttcggatatagcgcacaagaaatttcctcactggttgaaagtgaaacagatatttcctgaaaagaaataagatgccgattttccgtattgggtttactgtccggctttcgtgctttttccgaagctgaataaaacattaacaaaggtaagctccgtattccgtccgttcaagcccaagccctacgggtttgaaagaaaatctccacacctgcgctacgctccgggtagtattttcttccaaaggcttgcacagacggactactacactgatagagttaatgttcttaatcagtttcaaaaaaaaatgtgttttttaagggtagcagattattcctgccgttccttgttgtagtaggtctgtaaaagccgttctatatcgctttgacggtagattattttgccttttatctgaatgtacgggataacacccgtatctctccattcttgcagcgtgcggatgcttactttcaaatattgggatgcttcccggttgcttagaaacttttcaccgttcaaattcggtctgctttcctttgccagtcggctgataccgtctaacattctttccatagactgaaagaaatccttaattatctcactattgccgtttatcagttccatattgtcatatcgttttattgattcataattgatttgaatgattgacatatatcacctgtcagttacgcaaatactcgccataataagaaatggaaaggcagtcttttaccttgtcatagccgatataaagccgtttaaaggctgaaacgatgaagtaacggctatattctttctgtatcttgtaagtggctggttgtgcctgtccgttatccgatacatggagcatcgaaaggagatactttttcccactttggtatatcattaccgtaggatgaagatttagactttcccatgtgccgacaatagacggtagggtgaacggttggtttgcttctaaattgacatcttgttttcttttcataaggcgatgcttatttgttggttggtatatagttgtttttctttcctaaaacatcgtttatcgtacattctgcaaccagtctttcaatatcggcagatttatagtacagtttattaccgatttgggagtagcccaatttgccactgtcccggtagttctgcaaacttcggatgctgataccgagcagggcgcacacttcacgacctgacaaccatttctccggccggtgggtattctctctgcaaatccgttctacctgactgacgaaaccggagaaccgcccgcagacctgtttaaaagtctgttcctcaatagttacgatattcatacgtctttctcttttggctggttgaatatccctttctgcatttcttcccaatagagagccgaaagaacatcattgtgtgtacttaaatgttcttccagtacgttatcaatgaaatttccgatgcttacctgtttgcccgtaatcactcctacaatctgcatgatacgtttttgtatctctccacttatgtacacgctttgacggttgcaaaccgaccgttttttaaggaacaccgatttatagctttcctgttccttgcttgctgtttcctgtaatgattgttttacttcttccatacatttaatttttaatgatttataaataaattgattgattcccgatactgattgaaaaaatgtaagccagttttataactatatccctttatctttaaatagctttcaaacatggtttaaaactatattcaaaccttgtttgactgccttatatattgctgccattcaatcaattttcagcaaagaaaagggtaaaaacagatgcttttaaaaatggggttgctttgtccgtctgtgtcccaacttggcgtaatagggcatatttcaggggtaaaatgctgtctgtaattttgtaaccaataaacagatataggagaaagccaaaccgcttgcttttgcaatctgaccatagggaagatttttgttatcacatgataacagcaagttgtgttttgaggcactcatttcattttttgtgcctcaaaaccttgccaccttaaaaggtggttagttttactccgaagtcgtaaaaccagtaaataattatcattatggaacagaaaaagaagtcatttaacaaaggtgggcgcaagcctaaacttgacccacgaacacaccgttattccctgaatttggacgatgtggagaacgccaagttcttagccttttacgaccagtcaggctacaaggtaaaggcgcatttcattaagaactgtattttcgggaaatcgtttaaggtgcttaggattgataaaagcaaggtagattattacatccaactctcccaactattttcacaattcagaagcataggcatactgtataaccaaacggtgaaagagcttcattccaattttgcggaaaagaaagcatttgccctgctttacaaactggaacagtacactgttgaactggtaaagacgaaccagcaaattattgcacttaccaaacagtttgaagcatcttataaggaagagggggtaatatcggcagagaagtaagtagaggtttgccaaaagaaaaacatcccggaactgccacgtgcacagtttcgggatgaatttcactcttacttattcgtttccgtgttctttctcgaacttacggagcgtgcccacatcgaaccgttcctttatgaactcacgcacatcggaagcccgatagtaggcttttccgctaatcatcataaagggcagcagtttcttgcttctcaatctctgtaatgtccgggtactgactttgaatagcaggcataaatcctgattatccaaaagtttgtcattcggcatcacttcggggttggtctgcaatgactttacatctttacctacttcatccagtttatcaagaagtttctgcatccagtctttgaactcgtaattatctacatacatattgcttcatttttcaggttatacataaatgattaccaatcgattgatgaagcaaagttcggaaaagggaagcaaacaaattacagggtagcatacgctaccctgtataaattgatgctaaacgcctgattatctataccctttattttcgtgttcttttcggataaggtttgccagttcatcaaggaactcgcttaacttggcaggctttcgtttgatgacatccatgtacttttggtgataatcacctaatttaatgttaaacagccattcaaaggctttgcctaagtccgtcagatgaacgggttttccattctgatatgttacacgtttggaaagaaacaagccgctgacaatttccatgacattaataaggcttgtcttgtctgctaaatggagaggagaaagaaatagtttatttgcgtgttgctggaattgttcggggtatttgatgcgcaaattcactatgcgtatttctgttttgattagttctattgcttcatctataagcaacaacaaggcatttttccccctgctcaaattgcacacggtgcgatttgagcctgttcagtccaaaggaaaaataacgtagtaacacgctataatcctgttcattcatactaaaatcagccaaatgaatagccaattctttaatagcttctgtcaattctaagactgaaatttcgtgttgtgagtattccgacaatagccggaaaaatctctgttgtaatacacttttcatgtaatgtttaaattatattattaattgcctattttcttcttgtttttacatagccatttacataatttcctataatattatattcactatcgtaaataaagccattagaataatatcccttgataactttttcttggctataaatatagccattagagtagttacctatagtttcaccctgtttattgaatacatatccatttctatatgtaatcaatgacgttttacatgaacaaaaaaataaaacgcttataactaataatattaccttcatgttattacagattaatgaccaaaccttgatatatctactcttttagtttcctttttcttatatcccccaaagcgataactaaaatgtattgtaaacgctcgtgaataaaatccactattcatatccagcttttgtcctttgaaacggacttttgtagcaggcatacctgaatcaaatatgtcgttacaacgaacagacaagctaaatttatctttagcaaaattccatttcaacccggcagtaagattaaagatagattctatatcaaatgtcccttgtataacgggtgtctgcacattagccattaactcaaaagacaagtttttatttactctaaaagtattatccagcgtgccactaaacacccacttcttccggtcgaaaggtatgtcgaagaaagaatcacagcgctggtgcatttgcataccgactaaggttagtcgagaatccaaccaattaccagccttaaaaggcaatataatgtttgccccccatatctgcatatagttccaatttgtatttttataaattagtgccagtctgtcagtcgattggtaagcaacctgcgtaaaataatttaatgtatgggtgaaaaacaaaccaaagatgtatttctgcttcaatatataatttccattcaggttgtagtttgtcattggttttaagcccggtgttccccatagttcagtatatccattaagataactgaccgaagactgcatattccaataactcggataggttttatccgtagataacgcaagttggaatatatgtttcggagttttaaggtaagtcagcgataattgtggatagactgcccacttacgataactaccgagggtataatattctcctgtggcagaaacagaaagtgaagtacctgttgcatagcttttacttaacgatgcataaaagctggtcgtctgctccttcaaattagaatacatgttttgggtatgaatactacctgttacttgactataagtttggaaatcacggtctttggcaaaccgacaggatgctccgtaccctaaattccatcctttaggtagttgatgtttttggtctgcataaatagaataacgctttatcctttgcccgcctatcattgaaaagctactctgattaccatcttgataatctgcatatagatgttgattgttatcggaagtatattgtgtataatctccacctatttcaagcccgaaacctgaatggtattgtaatgtgacgttatgcatatgggtgtcaacgtgtttatctacattgctggtctgataattacctgttgttaagctattattatattggtcgggagtatagctacctgtatatatcacgttgatattatttttgtcgttaaaattatattcaaatgcagttctaaaattgtggttccaatacttactacgcaactgttcattttgtgtgatattatatagtttatcttttaatgtatgcttggaatcaagctctatatattccatgtttttcacatcattagctccatatattacatcaaaagctattttgggggttgataagcggaaatttccgtttatactgccactattaaagtattggttcttataatcggcgcttacttctccctgaaaagaataatcattcgagcgttttaaaacaatattaatggctgcgccccgtacatgatattcgggaggagtactgtacattacttctgctttctccacacggttcaccggagtattacgcaaaagtgtttcaagctgtccggcatccatcgttgtaggtttgccgttcagaatcactgttaattttcctgctcctgccaaagttaatgaacctctatcttcttgcactcccggtaactttgccaatgcttcataggcattatttactaattggttttgagtaagaacagcaagattatatcctaaacgtccattctctactttcacaaaaggacgttccgcttttacaacaacctcatccaaagcatagtcttggggatgaagctgaataattcctgcattattccctttacctgttattattttagtttgatacaaaagatgttgtataatcagacggtaatctttaggttggtttttcaaagtaaatgtgccgtcagtatcggatatggatgcacctatataggtcgaatccatagcttgcaaaacgatagttgcaccgtctattggctgctgctttccatctattatttttccattaatcgtttgtccccaaactactgtttgaaaactgcctaacactatgtaggaaattgtaaatattattattttgtttaattgcatcatgttaaattagttcatcaattatatgctgtttaaaaaataaaagtaatccctgttccaaagaaccattcccattttttctgtattaggttatattggtagttggtttgagatttgatagtgatatgtttacttatattgtatgaaaagcctgtgcctacctcataagggatagaggttgtaggaagcacaacactacgatttttgtctaaagtataattcccatatatgttaaaatacagtttttcacccattggaattgatagattagtactcctttgtaatttgatattagggttatctgtgtatatagtgctacttattctaaattttctaattgccatacattcgcttttcttgttataagcactatctgacaatagatgatactgaatatgcagattacgaaaacccaattgtggatattttattaaactattttcatcttttacacctaatataaagctattgaatttattgctattatttttcatgggagaacctgtaaaagattgctccaattcttttttgaaagcatcatttatgtgaatcggtatttcaccatctaacattttagacaatcggacagaatcattctttgtccatccattttgcacttgagcagtgattggatgagaaataagaaaaacagcaaagagcattgacgttttcccccctttatatagatgtttgattatttgcactcctacttcgctatttcaattctatagttggcaaagtaaggcagaataaagaaaaaaggtcttgacaattatcaagacctcagtataacagatgttaaaagacaggcaatttctccagcttgcggcgtatgcggctgattgtttcaggtgcaacccctaagaaagaagctatatttttcaagggtatgacatctttaaggttaggacaacgtttcattaatcttcgatatcgcatttcaggggcacaatacgaatcaagtaatcgttcatataccatttcatatagattttcagctacatatcttccgaatcgctgagtttccatattcgtttcccaacattcaataatatcatggcgggatatttcataaacagagcaatctgttaacgcttgaatgcttactaacgatagactacctttcataaaagaagaatagtcacatacaaattcatcggtaaaagaatatcctacaatgtattcttcgccctcttcatcaatgtatgtatattgaaatgtgccatatttcacccatccagcaaaacgttcctcttcattttgtcggataaagaaatctttcttgtgataagtacgcaatttacctttttccgcaaataaattttttacatgggaatagtccaaattattgaggtatgaattaaaatcgttcatctacaatgtatttttcacaaaagtatatgaaagctcaaaaatattattaggctatatctcatatttagaagaaaataactatttttgtggagaggtttttggattgatgcaatccaaagtaaataaaggtagatagcacgttgctaaaacgttacccttttcttgaaactatcttataatgatttgtatttcaaagcaatagaatgcaatgctatagtagtggcgaaggtgtggcggctcaggtggaagccgatctccttgtggatgccgcaggctttggctatctgtttgaggtgggtgttgcacacgctgttactgggcatgggaaagacaaggtcgtccccggcaagccccctgtacctctctatcagctccttggcaatctccatgaggggaacgttgctcgatacacgggtcttggtgcgccgggtgatgatccattcctcgccgtcgaagtccatgcgctgtatcttgtcatgggtgagcgtctttatgtcaatgtagctaagcccggtgaaacacccgaagaggaacatgtcccgcacgaggctggtctgtttcttgacgaacacggcgttagccaaggtgcgcagctcctcttccgtgagatagccccggtcggtctcctgcatttcaaggctgtactcgccgccacgccttgtcggtcaggctgagcaggggcatggtgtatatccagagggtgttggcactcagccctttctccacccgcaggtacttgtcgaaatcggtgatgatctccttggtcagctccttgtaagccatgtcggtgcgcttcttcttctcccaaaggaaggtcttgaaatggttgtaaacagccagatacttgttgtaggtggacttggctcgctgccctttctccaccatcgccccgaactcccgattcatgttcccgaagtctttgaggatacagttctccatcatgccgacaccgaggaaggcgttgcgcaacttttcggcggtgacgaaatcctcttcccggagaatgcggtggtagtggttggtgagccgggcggagacctccttcagttgcccgtttatctcgtttgcttcggcggacttgcctttcgccttgccgttctcccagaggtcgggagtgacgaacagcttggttcccactgccttgtcatcgccgtcaacggagattttcaccatgatgggggctttcccgtcccggtttctcactgcggatctcttgatgtagaacgaggtcgcaaacgtacttctctttgtttccataactctaaaattttcgtttctaaaggtagttacttatttcttaccaagagctatgcaaaacaaggcaaagcgatgaaacagaactcattatgccgtatataccccgtttcggaaccggtagctgtttagtagccgaactttgtccgaaaggggtgttttcaggcattttatgccgaagcctgcttcaaccctccctgcatacaagatgctgacctgcatttatttatgtagaactttgcttttctttgcgccttatgccgattttttcccaaaaaacttttaaataataattatatgggaacaagaaaaattatctgtatgggaagcttattcttcttgtctgtagccattccctacgaaaggcagacaagtattaggggtggctgttcccggaccatttgatcaaactgaaattgaaaagcgagaagatgtgttggtatatacaacacctgtactccacacagccgtaggagtgacaggaatggtggaattaaagttgtatgtatctttcaagcaattacaggaaagtcgacgaagctagcttactttaaaacaatggatgtaaatggaaaaaattcataactatgaatgaagaaaaacatagttatgaattgaaaatttcatagttatgatttttcagtatcaaaataggcaagtaattcttctatcgtttgggtgatataggtaccgccggaagtctcatggatgataaagtgggtggtctttaaatcgccagtctcaatccaaatattcgattccacttcccgattcgccaaaattccgtttcgctggagccctttacgcaccatagcgtatttctgtccatgtccaacgaggcgaatctgtcgagagaattgattatctatacggaataatccggtatccttatcgaaaacaatccctttccgggcgaaaaagttgcttagatgaccactcaatgccaaatcctcgggagtaccggtagagataccattcgctttgtccattaaccagatcttatccgatatctgaagagccagctccaaatcgtgagtggacataaatatcgtcttattcgttttccgggttagatgatggagtaattgcataatctctaccttgctggggaaatcaaggaatgcggtaggttcatccaagtaaataaccggagtctcctgagcgagcgccttagcgatcatcactttctggcgttctccatccgataaggtatggaccatgcgggatgctagttcctcaatgcggacaagggcgatggattcttccacgatccgcttatcatccttgctcaacttaccccagaagccggtatacgggctacgtcccatcccgaccaattcccgtaccaacatattccggatctcacatttatcggtcagcacgacaccgatcgtggtgctcaattccttatcggaataagtatctatatcttttcctaggaccaatatttccccatctaatttaggttggaaaaccgataacgtgcgcaataaagtagacttccccaccccgttagcacccagcaaacaggttaattcaccactatagatcgtagagtgtatacctttagctaccagctttgtactactcttagaatggtaaccgatcgaaagtccgttaatatgaatcgtatcttgtttcatcttactcgttcaattcattcttacgttttctaaataatactgaggccactactggagcacctactaaagcggttaccgagttgacaggtaacgctccctcgaaccccggcatacgggcgatcaaattacagatcaacgccaacgccgcaccggcgaataagaccgcaggcattaaaatccgatggtcggaagtttgaaatatggcccggcataaatgcggaacggctagccccaagaagataataggtccgcaataagcagtgacaatcgccgtaaggaccccagccgaggtgataaccaacaaacgggcccgcttgatattaagtcccaaattgcgtgcgtagctatccccaagaagcatcaagttcatggtcttgataagcaggaacgagagagggatcaagattgtcataagaatcacgaacaacgtcatctgattaccggaaacacgggcgaaactacccaatccccaaatcacgtatgcacggatatcctcctcgacgctaaagaatttaagtacaccgatcacggcgtttgccacgtaaccgatcatcacaccgataatcaacaacgtgacatttccttttaccttttgggaaacatacacgatcagcgccatcacggataaggaaccgatcacggccgctatcgataaggcgatctcccccataaaaccaagtttactcaaggcaacgccccctaaactaccgcttaacaacaccacgaaagcgacacccatgctcgctcccgaactgatacctaagaccgaaggtccggccaatggattacggaaaacggtttgcatctgtaagccgctgatggataagccagctcccgctaccaacgctgtcaatgcctgtggtagtcgggatttccagataatattctgccatgtaataggctcatttcctaaattccagataatatgccaaaccgattgaagaggaatagagactgaccccaacaccaaattcaaaaagattagaacaaaaatagccgtgacaatcgccagcatccatagggtatttgaatgtctcatcagtgttccttatttaagtcgagaataatagaccgactcatgatccggtaataaatccggatgaaagatatgaagcaaatccgctaggacgatctccggttctgtcggcatactctcataaaacggcgtgttcttcatattacaatagataattcctttctcccggaacgcacggaaatcctcataacgaggatcttgctctttcaatgcctcatagctgaacgttcccgggaaactattcacgatacgccaataatcagcgtcgtccgcttggttatagaccgtctcgaagtctaatgtaacaccaccggatcgctcatcatctttcaagaaataatcagcgccggcatccttgaaaagttgcgctaagaagctctttcctcctacagcataccagtttccaccccgtaactcgccactaaaaacgatcggacgttttttaaccttaccatccgccgtaagttcctttaattcattatacctcttctcgatggtggcgaaacgctcattgccatctttctctatccccaacagcaagcctacgaacttgatccactcggcctgtcccaatggcgtagtctccttataacccaaatggggaatcaagggaatacccacgtctttcagcatctcatagcctccccgcttgaatggcgatacaaggatcaaatcaggattcacgctcatgataacctcgttatcgaaattcccctcgataccgatcttagcggttttaccttctttcaggcgttcgttcatctctttattgaacaaatgccgtgtactggtaatcccaacgaccctatccaaggcacccaatttaataaagttcgataattgcagggaagtcatacagataacgcttcggataggaagctctatcaccgtataatcagcgggaatccccgtgggtttcgcacctcttttcacgaacgcataatgaaacgtggtgctttcctcattttgaggatcttggatatcagccaagagatattgatccgcataggtaagcttgaatccttgggcgtataaaggcttaacctgctcttgcgagaacgcagattgctctacggaagccgtcttccctatttctcctttttcacggatacctgaagtacatgataaagtcaataccgataaaagcaagcatccacccgctataaacttattcataatccttgtttaattgacagttgatcattgacagttactctcgtcctgctccacgggacagcaacatttatttatgaaccggcaggtcttctgacttacttccattcaggacgccttcccgattacaaaaccagtggccaaggtattgtccgaatgtttaaaagttcacagcagcgtggtctgtccgggattctcacccggttcccttttaatccgcctcccggaaaaagagataagcggagcctgttacagtgacaaaagtagtaagaatatttgtatacatccacaattttaaggacttttgcgtttcaaataaaaacagatacacatgaatcatcctattcacttcgtctcattaggtcccggtgatccggaattaattacgctgaaagggcttaaaacattacaaaaggctgatattatctattgtcctgctacacaaggcaagcatggaatcatatctcgggcgacggatatattgaaagctattgaggtagacgaatccttgatccatccgtttattttgccaatgagtaaggaacggacagatgcgttaaacgcttataacgaattgtttctggatgcccaagctgaatatttgaaagggaaacaaatcgtgatcgtcgccgagggagacgctggtttttattcatctatacaatatgtatacgataaattcgaggaaacaggaatcccggtagatcgaatcgcaggaattccggcatttatagcggcaggtgccttggccgggatacatatcgtaaaacaagaggagcaaattaacgtaatccccgggactgcgtcgttcgatgaactttcggcaaaaatagaaaatggaatgatcatcgtcatcatgaaattaccgggttgccaagaggctattcatacttgtatccggcagtatgcggataaggcggtttttcattatttcgagaatgtaggaacaagaaaagaatattatactactgatatcgccactatacattccaaggatttcccctatttctccctactgattatccaacctcgctaaaagaagaaggctgcccggagagtaaccaaacccggacagcccatcttattacgctacatgcaatatatgcttaagctgatcgatatggaaacgaagtgtatccatataaggtttcactgaattatggtacatgaccgcttttgcgtgcatatcttccaactcgcttactttacggttcgcctcacgcattttacaagcgttgtagcgaatacccgatacatgtcctttgatatcctcgatcgcttggtttccccggttgaagatagactctgcttcttccggagcgtataccgtataggcttgggcaacgtcatccagtaacgcctgttgataagagccggctatcgggagcaattgatggatcgcatgatgacataaagaatgaacctcgttttgaagcttcttcaattctacttcccactttgattcacatacttcatccaattgtttgacttccgctacgacacgaccgctaaacaattccactaccatcttttcccatgcttctgctacccacgatttagtagcaaatgtaacctgactaaatcttactgttgacataaccttaaatttacatattatattgctaatgttattagtctcttatctgtttcaatttatcacactcaaaccattttaggtttctttttatcgttgtgacatcacaaaattaatcaaattattacagatgaataattttaaagactattttataattctttaaaagtacaacaagcaaaacgtatgatttttgcaaagctcactttacaaaaagtttaatttcaagcctgacagctatcacaaaaagcaagatcctcgccatcttcgcacaaaaatatcaaaataacacaatcttattattccataaagggggaaaaccttgttccgtatcattttgttattataataaattagatttactttgttcaaactatataaacttacataaagcacatgaaatcggacattgagatagcaagagaaacagacttgcgtaaaattaaggaagttgcgacaacgttaggtatccctcgtgaggaagtacaaaattatggcaggtatattgccaaggttcctatccatttgatcgataaaaagcaaatggaccagcataatttaattttagtgaccgctatcactcccactaaagcgggaatcggaaagactacggtttcgatcggtctggctttagggctgaataaaatagggaagaaagcggtggtcgctttacgtgagccgtctcttggcccgtgtttcggcatgaaaggtggtgctgccggaggtggatatgcccaagtgcttcccatggaaaacatcaacttgcattttacaggggattttcatgcggttacttccgcccacaatatgattaccgctttattggataactatatttatcagacccgcaacacctgcgagggattgaaggagatcaaatggaaacgggttcttgacgtaaacgaccgtagcttacgtaacatcgtatcgggtctaggcggctcggcgaacggtgtccctaccgagaccggatttgacatcactcccgcttcagagatcatggcgatcctttgcttggctacggatatagaggatttgaaacgacgtgtcggaaatattttattgggttatacaaacgaagataagcctttcacggtaaatgatcttggcatagccggagctattaccgtattgctaaaagacgcattactgccgaaccttgtacaaacaacggagaatactcccgcatttgtacatggaggtcctttcgctaatatcgcccatggatgtaattccatatcggccacccaaatggctcttacttatggagattatgtgattacggaggctggtttcggcgctgatctgggcgcagagaaattctttaatatcaaatgtagaaaagcggggctttcaccgaaactgacagtcatcgtagcgactgcccagagcttgaaacttcatggtggcgttccggagaaagaaatcaaggaaccgaatatcgaaggattaaagaacggattcgctaacttagataaacacattgagaatatgaagagcttcggccagcaagtaatcgttactttcaaccgtttcgctaccgatacggacgaggagattgcgttagtggctgagcattgcgaggagaaaggggttggattcgccatgaataacgttttcgccgaaggcggtgaagggggtacggagcttgcccgcttagtggttgatacgatcgaaaatcatccttccgctcctttacaatatacatatgatctgaatgatccgatccgtacgaaggtacaaaaagtggcccagaagatatacggagcttcttcgattgtttatacgactttggccgataaaaaattgcgtcagatcgaaagcttgggtatttcccattatccgatctgtatcgccaagactcaatattcattctcttccgatccgaaagcttatggggtcgccaaagatttcgaactaaaagtacgagatgtaatcatcaataacggagccgagatgatcgttgtcgtcatgggcgagatcatgcgtatgccgggactcccgaaagagccgcaagcccgaaagatcgatatcgtggatggcatgattgagggattgagttaatagacagtaaaacgattcaaataaaaaaggtgcgcctcacacattcagtaaggcgcaccttacttttgcttatttatgaataaactttatagaacctctagctgtatttagcaaatagattcctgctggcaagcgagagatgtcaatacgattcgacttactctctgccattttccctccagttatcgcataaatagaaatcccgctttccgttccttgtacttccaacacatctccataaatatgaagtctcagttcgttctcctctactacaggagcgatagaggttgttccattgaaatagtcatgtgtctttcctgaatattcccagcttgtctcagtggggaaatacattttctgataatttttcgaaatcatcgggtttcccgcatccacgatctccgtcttgctttctgacataagcatccaactgccaccgaaatcaatggaagacgaggttttcgtgacattcttatcgtaagaccactccattttcatcttgaacgtctctccctcagccgtacctgtcatgagtatcgagaccggatatttatctttgttgaaagtggcttctatatccactttcgcctcggctttccatgcgcctccctcaaagctggaggaagtgacggagaacttctcatagccatttccggtataagtgtattctgttttctcgcctgccacgtcggctgccgaataagagatagcgaccaaagtgcgtccttggttatcattctccatcacggtcttgccatcatatacccaatcagacgaacttgagttccatttataactgtctatacgaaccacgcttttattaccatcgcatatataaacatctttctgttcctgcgcatcgttcttgtcataggtaatactatagtccggacatcttccaaacaaataccccggaagagagaatgattgcgccatcaatgaagaaatgcctactaaacaggctaccaatgtaaataatactcgtttcatattcttgattttttatgattaaacttaaaaactataacctttctccgcaattcccgcaaaatgtagcggtcggagctaattgcattccgcattgagggcaaaagcggctttccggcgttgagacctgtcccggtatctgcggtcgcaaaggatcttgtgctgcggaagtagcggtgggattcggttacggcatctcgttacctttcttgaaaagctccttgaacttaccggacaagccgctcaacttaccatacagatcgaaagtaacttgcgtggcgggagctacttgcatatagctgctcatcattttcaccaagatccagctatcaataaaggcatactttactgtataggcgaacaacaatgaaataatgaaagccatgaaaccgctccagccgaacaagcggaacaatccaccgaagaggataaacgcaatcaacgtaaccaccacgaacgataagatgaccatccccgttgtcttcgccgcatccttgagcaacgtcttccagttctgaaaatagataatgacaccatctgccgccgatttataagggttttgagccggatggtaaaaggtgtaacctaagcagcactcgtccacataccccaacgagatatcgagaaacatgttggtgaggctctttatcccgtcagctccggggagcgccccgagcaaactgtccgtaacacgtcccaacgtacgttgtaactgtttaatggaacccgccacaagtttatccaaggcaaaatacacgttggatgtaccgaaacgttcctttaccatcgtctttcccatctcgaagggtttggcaggtacatagccggtttgatacgccatcgcgatcacggccacatacccggcttttacgagataaccgatgtagtgattcaagaagaaattcactacccctataagtcccaaccagatgaaaaacatgatcgctaccactccgtcgctattgaacaggaccgatatgcccatcaagatagcgaagagcagcacggctatcaatatattcagcaatcctaatcctagttttatccaaccgaattgcagggtcttgaagaaaatctcttttgctgtcataaagtatacatttatgggttattatgctatttcaacagacggtatttaccgatgataggtaattccttagctcgcccgttcagcgcgttaatgataccgatgactgccagtaccgtaaacacgatgtaaacgaggttcaataccgtaccgcaaagagagtagatgctccataagcccaatcccctccataggatcgcccgcaagagggcggtcagaacggagtccgctatgatccagccaaacatggcgatgcataaaagcaagccttggttggcatggaaccgggcgaatttcgagtccttggccgcaaggatcgggatcaataccagaatcccgaaataagcaaggatagccattaccttattttgctctacatcggctttatcgaactggtcggtcaggtccgcggtcttgttcataccacttaatttgtcgctcaaggcatcggccgtagcggtagccttagccattgattccgcatcggtcggttgtaccggcggaggtgtctgttgcctgttcggttcggcggcaactatttgcataggtgatccgcaggccgggcaaaatctcacgccttcattcacttgttgtccacattttccacagaatgccataatttgtttcctcctaattttagtattgttattatttgagtagatctccgaaagcttccatcaagctgtctatctcgctaccgaacagcatccgtacggcgaagaacatcagcaacgacaagaccgaaccgattatcatcatgatcagcatcgcacgggcgaagttcgccttgttcaccttctggcagcctccgcaggcccagataatgagtaggatgagattgatcaacggaagaagcatcaacaggaagataccgatatacccacccgtcgtgatcggttcatacttgcttcccgggggaagcggagcgttcggatcgcccgccggagccacgtatcccggttgaggttgtgcgtaagccggttgcgatggcggggcataagcctgctgcggtagtggctgaggcgcaggttgcggctgcacataggtttgctggggcggtggcggggcttgcggttgtgcctgtaccgacatcggcgtaccacatgaggtacagaattttatgccatccgggacatttgtcccgcagtttgtacaaaaagccatgatttctcctttctttaaagtaactgttatacatcattccatttttgttccgcaaccgctgcagaaacgatgcccggcgataacttccgtgccgcagttcgggcagaaacgtttcgccgcaggcgcttgttgcacgggttgcgtcaaacgggttccacactcttggcaaaagttggttccctccggattataggccccgcaattggggcagctatgctcctgctcctcggcttcccggcgggcacgttcctcggcctcggcacgttcgagggcggctttccgccgcctgcttgttggctgcgagtaaatctagctctgcccttatctccggatagttctcgccgccatccgtctcatatacttgccgtccgagacgggcatagatctttccctccctttccgagaactctttcatctcggtctgggcattgaatatcttcacgtcgggatcatcctgcagcatgaatccggacaagccttttacgattcctgttaaaatatctcccataccaccttactctttcttagttcctttcgccttatccgagaaatctcccatatccagattctttatcccgaccttcgtggccagcgccgtcagtttcgtcaccttggcgattatcttgatcttggtgacacctcccacctcgttgtcttctatcgttttgttcaatacgctaacgggttcctccaagtctttcatgatggcatccatctcgtccttggtcatcttatctccttttttctccagcttttcaatggcatcatccagttttgccaaggctttatctaccggcgaacctccgcatgccgtcataagcacgaggcttatgatgaacatgaatgtaaataatgtctgtttcatgatacgtatgtttttaatggtttacaatccttctattgaaactagctcttggcttgtcatcagttttcccttcttgttatacatgtttgtcttcacagggccaatgccgtggccataccagatcttctggatagtggtctgcttgataccgatcactttcgatacggtagtgttctcaatcacgacgcagtcgatactcgtcccgttcacgtcgagggtttcctcggccacggccttcacgcccgtcacctccgtattggtcttgatgccggccaagttcaaggtgatggtatagtcgccgaaggtatcgcctaccttgacattggagggaagttggaagggtgttccggtcacggttacttgcatgccctccatgatctgtcctaccaacgacttgggatcgtaggtcaccgtgccattcttcacctcgaatgtctgtgtcatcggttgcttgagcaccgggttctttttattgtccatcaccatcatcgagtaggtaacggtgcagttgtccgcgtctcccgtcacctttgtagcggtagtctccgtgtaactgttgatctttcctttcttgtccttgtcggcgtaagtcagtttcacgccttccttatgtaggaagaaaggttcttgcgcgctcattcccaataccgtcagcaaggaaacggcgatcataactagaaatctaatgttcgttttcataatcgttgttattttaaagtgaataatttttctctatttcttcttctgtccgcccagcatctcgagcaaggccttcatccgttcctcgtcgctcttgctcttgtcgttgacctctttcagttgctccttgatctgctcattggatttttggatggcatcgcgtgtctcgtccactttttgggtgttctcctcgcacgatttccccgtcatcatctccagcaggccgccggcaggcatcacagtcatttgatacccttcgggcacttggaagaggtgcgccggttgcggccccatcttgacgcggcgaagcacgatggtcctgtccatcacatacaccgtattgtcgtgggcgatgcagccgttgtagttcgataccttcatgggcgagtaaatccattcgtgatagccggcgccatccttgccgccatccttgtagatcgattcgctcttgacatagtagtgggcacactccttaccgtctatctcctccatgcccaaaaactctcgggaggtagagtgagacacttcccagtcgtaacccaccagcttattggtggataacttgtcgatctcctccatcaccatgcaggtcttccgggcctcgttcatcacgtaggctttcttttccttcatatcgaagatcatgatggtcttttcgccaccccctttccggcaccactcaccatagaaagaaatttgcgcctgcgccgccgtcgttacgtacagcgcacatatcaataataagattaaccttttcatgtccattccttttagtgttgttagtaatcatcgtcccgggctagcttggaaagcgagccgcgttctctccctttgtcgggcaggatatccacccttgtatctacgtccaccagccgggagaaggctttcaggtcctcattgctgaggcgtatgcagcccatcgttatccgtccgggtatcacttgggggttggcggtcccgtgtatgccgatgcccgtgaagccgggtgttttcaagcggaagaagcgggggccgtatatctcgccgggagtttcttgcctcgtcgagtctcgcggccaaagggaggtatcttccacggactctatcacgaaatgcccttccggtgtccggaaatcccattcctgctgcttgtcgccgtaattgcgtccgcaagcgatgggaaaaacggcgagcgtatcgccttgcggacaaagaacggttatccgcatatcctgtttggatactatcacccggttcgtgccgtccgctttttcttcctgcgcccgtagcgtcgccatcggcactcagaggagtgccaatagcaacaacacgatccggcgtatatggcaagagaaaatgttcatcccgttcctgttttaatggttaccttaaatctcacccgggctttccgagtctccgccgccctccgggacacctttggccaaacggtaatcggctatagaagcgtagctgatgtcgtcctccagtacgccgccgtcctcgaacgtaaggccgctgagcacgctctcccgcaattctttcgagggagtgaatacgatccggacgttcttgatcatgctgttcgcccggaaactgttaatatcttccacgccatcgctcttgaaggtgaggcgaaaagtacccaagcccggtatcttcaccgtgtgtccctgctggagttgttggggcacgaacttggccagaagctccagcgaggcctccatctcgatgggagcagtagtggtgttggcggtggcggcgcacgtcatcgccttgcccgagagcggggtctcgcttttgggggtcgcgtaccatttgccaggttcctgtcttttctgcggattcactttcttaattaacttgtactttgccatcttgttttgttttaaattgttgataatgtgataattgttatttctctctattctcgttgccggtcttgcaggcgtgaggctctaggtgtcgcacgtgtgaggcagctgatgtcatacgtgtgacaccgttaacgtcgcacgatggtcttgctcgtcgatgactccccagcgttcccctctggccaccgtcgcccgattcgccttgcatttgtgcgggtgtttgcttcgtctcggtgtttaattgattctccataagcgtattatactcttcccagaggatattgaaccgctcttctcaacgacgggcatccgcacgagcttcacctgcgcccacgatacctccgtcgcccaaagaaggcagagggcgatggcgggaaggaatccatatttaccgtaattggccatagtcattctttttatcgttcgtttctttaattcttgtcacttcataaggggaagccggtgtcgggaatcggattccccggaagccagagggaaggaatccctgcgcttccggagtctccgacgggtctaccagaatctatccccgtttgtgtcttgctttcacatagtgctggaacgatttgaagggagggaaataaaaatcattccagcatgtcagagagctatcttgtaataaaagaccgctatctcggaataagcgtaacgcttcgttccgggagtcggtatgaaatcagtatggtagaagcggcgggcgcttttgctacggatgcgctcgtaggtgccgtaaaacgaggcgttgtaggcggtggagcaaaagcggacttgctcgatatcctcctcctcggccagttccgggaaacggcggtataacagtttcaagaacatggccagataaatacattgccagttccggtcgtccagccggagtacgcatatgcggtgggcctccaacgtctcggagagatcgaaatagatcccgtactcgtgtcgccattccgttcgcatccactgtcgttccagatcctccacgaaggaaggcttcatctggaagcggccaatggagaaatcggctccctttacccccttttgctggtaaagcgccttgacggctgttgtctccataaagtccatcaaggccgagtaacgaaccaattcggggaagacaaccgccacggccaactccgtccggataccgaactccgggaagatcaagttccagacctcccgttatcccgccacgtacttatcagcttctatccattccttttcaaagatcttttggtaatcctgcgccaaggcggtcgatccgctgagagctcgcgccaacaacgcaacgaggaataccgctatagtttgtacgtgcatttttcaacacctgcagacgaggcgatgatccacaccagcctgtcgctctccttcttgaaagccagcggatagaaggaggtgccgtcatgcagggtaagcgatccgtcgcgcgtgtaggtcaccttgcgtgtgccgctagccgaggtccaagctccgtaggtgggttccgtccgtgcccctttcgcttggaaatcgccgggatcgttcggccccagttcccgcttcttgccgttttcgtaaaggtatctcttgcccgcattgtcggcggtgtagacgcggctgttgttcaagaagccgtcgaccgacgtggcgaaaccactctccgcgtaaaacaggtgctcaccctcgggaatctcaatgatcgtctccatgtagaccggcaacacccgcggttgcgggaagtcgcaatacgccttgtgcaagatattggtgtaattggtcacggcgttgaacgaggcacgtttctcggcgcaggccgggatgattccctcctgcatcatctctttctgcaacttcacgatgtccggatacatggcctttaccccatccaattgggtttgcaggctgttgcgccagagcttggcggcacggaggcgatagtttttcatccgctcgtcggcacgggcataaagttcctcaaccttctggctgtcgtcggtctcatagatctgggcatagagggtctttaattccgattcgtattccccggcgatcttctcgcaactcgtgatcgcgccatcgctcgcctgtagtatctttttcatcttctcggtttgctgcacggtcatttgttccagcttgacgaacttggcgttgaaggctgtcgttttctcgttcgtcgcctgcattttttccatcatggaacctaggtcgctcaggttgccttggttctccgctaagaaggccatcttctcctcgttggtcaacttgcctcctttggctgcctcacgtttctccagatcggcgcccatggcctcaagcccccgggtatcgcctaccaaggcgttcttcatcttctcgatcaagcgttccttttccgcttcggggaggttcgggtcttccaagcttttcatttcctccaccgtaatcccgttgatatcggccaactctacatagaacttatcccggagggcgatcatctcctcgtccgagcaggtatgtatcgaatccagttccgttatacgcatatccacggctacgatcttgcggtagtaggtcgcacgggcggtttcctccgggtagacgatgctctcgacggaaggcaacgggggaagctcgttcagcaaggcctccggcgagttggctctgctgggagcgatcatctcgtcccacgtggcggtagccgtgcgacgtttttgtagcttatccgtgggggtgacagatcgtgtcggctgatcgccatctccaccgacgaaaggctcctctcctatctcggcggtatcatccttggtacctactacgttgcccactttctgtttcagtttcttcaagaaactctggccgtgcacctccaccggtatcctgcagaatatcgcaagggcgattgccatgatgttcaagatctttctcatcgttgtatttgtttataaggtgaatattctgtcgtctattcgtatcggatacgctcccatttctccacgtcatccaagctttgatctatatgtatctggatgctcccgtcgggcttgcctccgaatccctccttggggatcgggtcgttcacgctaccctggctgcggaaagggatcgttcccaatccgctgatgctaagcccgtcgtttatgttcccatcgatgacgatgaaatctcgcgtggcgtaataattcaggtagtgatcggctttgaacgatattccctcatcgctgaccgtaccggataccgccacgttatgctgcaactggaaataggtctcgatctctggctggggcttgtcgcccggcatccattccctgtctcccatgaatacttccgtgctggcgtaaacagatttggtcggtttcttaggcatattcaccaccaccttcaccggcaggcggtatatgttgtgggcctgcgtgggtttcgtgctgtgcttgaagccaaggccccagctctccgcccatagtttcatatacgactggtttatccttatatcggaggcgaacatcggggcgtctccaacgatcgttgtttgtccgaaacgtagcagttccttatccacaaaatagtgcgcatcccaattctgcatacaacacctcggcgtccagccacccgatgtactcaccagcgaaagtcccgtagaactgctgctccgtcagtttctcgttggccccgtgataactcttctccagcttcatcttgatcttccattgctgtacgcacatctctccctcataaaagaaaggagcgttggccgaaccgttcatgcgcagcacccacgtctgtcctttcgtttgcgcgatctgccacaagcggttgttggcgatgcgatagaaacgggcgagcgagaccagattgtcctcggccacgcagttgatccatttctgcttatcccgttctcgagcgttcaagaagatctcgatacgccctttcaggctgaagatcttacccaccgtgctgagtgtcttattcaccaagtatttgtacgcctcgctcttgagccgtccctgtatcctctccgcctcgtaatacttgtcgcgatccttcacgccgctgatcagcgccaacgcgtctcccgccaggccgttcaacccgctcatgctcacgaggtcgtcccagaattgctcgttcgttatatcgttcggcttggcttgcgccgccctttcgatcacttgccgcagcgtggcgaaattccagcccaggtcgcttagggcccggtttaccgcctccttcttttctttcaggtcgatggatctggtgcagaccaactctcccccgaagatgatggggcgctctatatcgttaaacgacttaaccttaaacgggttgactccgtaatacatggtataggtcaacgaatggcttcccggctcgcaaggcaggttgatcaagtcgaagtttatcaagctccaatccgattgcgctatcacccgggaaacagcggacaagcagaatagcgttatcacggtaaatatgaatcctatgcgtttcatttgtgtcctcctttccatacgttcagtaatgtttgcaatcctttattctccggatctatcagcagcccctcgttcaggtagtaggcggcctttacgctatcgccgttctgtacgctcagcaacgaggcaccggcgaaattgcgtgcgttgaaggggttcgcctgtacggccgtctcatacagcatgagcgccgctcccacggccgtgggtaatacgaccaaggtgtcggcggctttcgccgtcaggtagtcatcgtcgaaattaaggtaatggtgcgggcagctataggtgctcaggtgaaaatacttgcggtattcctcctccttggggagcagcctgcgggcaatggccctgagctcgccgctcgtaaggtcctgccaataggagaaatcccatacggtggacgggaaagcggggttgcacatcgcgttggcgtagcattctctcgccttatcttcctttcccttgtaatcccacgagatggcctcgaagaagtaagggtaaggcgacgctatgctttgggtagccaacaagtcccaagcctcgctccgctcgctgtcctcatccaattccatattgacaagctcctggctcagtttttcggtcatcgtatccagcttcccgattaggttggtaagcgcagtaaggagtcctccctcatcttcccatccccaatcttccatatcttcctcgtcctccttgcgctgtttctcttcggcggctttcttggcggcggccctctcgtcgcgctgttttacgtagatcagctcgctcaacccgtagcgaaggctggccacggctaccacggcttgcccgtaatagtagttcgcctgtagcatatagccttgctcgtaaagcttgttccctttttggaacatctcttcggcctcggccataaaagccgtttccgtaggataagcgccactttgcccggtgggcaaggaaggcaagacgaaagcgaatgctcccatagcggcaagactgagtagtagaatcgatagcttcttcatggctttcttatttgagcgtgttatacattctatattatatgaatacctatttcaccagtttatagccctcctgagaggtcggtatcaacgacggatcgggcgagaaggtgagcaacgtgacggagggttgcggtttcatccgttccgcatagttacccattccggctcctcctttcacggagaacttgcggtgtaccacagctccgctattcttttcaatccagacgatgtcggtcgtctcgatatgtttcaagtctataatcgagttgtccatgctggatttagtgccaaagaggtctcctatggctttcatcccggcactcaggtcgttctcggtaccagtgacacgggtgatcttctcacaatcgaagccgccccaacgcacgtcctctaccccgacagattcttgcgtgctggactggacaaagctatcgtcctgttccacctttttctctttctgagcagtatggacaatgccatacacattccctatcttgtcgcaaaagaacgcataatagtccgagtcggaagtcgcctttagctgcgccaccttgtttttagacgaaatctggtaaatcttataatcgccttcgtcaagcaggataagcgtctcgacattgccagagttgttccagaaatggtaataaaggattttgcccgacttttgtatttccacgttcaccttgttccccattgacttagctgtcagttccatacggaagttgcgagcgaaccacggattctccttgtcgagcgccttacgctgggccggcgtgagcgacggatcgacaaaggcaccgttatccggcctgtcgccttgtttatccatttccagatcgctccccttttcggaggcggccgcttccttccgctcctttacggcctcggtagccgcacggagcttctccttgatcttctccttgccgccgcaagccgtcaccatcaagacgaggctcgccaagcacatcagtatgtagaatttctttttcatatcgctcacttattcgttacatcttgacaaactccacccgccggttcttggcacgaccctcgtccgttccgttatcggcgatgggagatgattgtcctttgccggaagcggagaggcgatcggcactgatgcccagttcaaccagtttacctacgatggcgttgctgcgggcctcgcttaacgtctggttggaagcctcgttgccggtgctatcggtatggccttctacggagaatctcaggtcggggttatcggtcattaatttgacgatacgattgatctcacccatactctctggtttgatggtggacttgccgacatcgaaggtgatgccatacgtgatgaacttaccgtcgctcatcatgcggtcgtacaatggcactgcgcctttggcgacacgtatgttgcggatggaagtgttattcgtaaaatatccaccgcctctataaaactgtatgtcaaaatgtccgggtgctaccgtattcggaatattggcatagcggataccatttatgtaaactttcattgcccgttgattgaaggacagtgagaagtggttccatgagttcgggatagtccgaaaagagtcatcgcttccgctacggctgttctccccagaggaaggaataaagtcccatcttaggcgtgtacgatggtctgaagcactataataccagtcgtcaagattgatagtttgaacacgacttcccgattcgggtttgtaaaaacgtacgatatagcaattttccggctcatcatctcccttttttgtaaaaggccctacccaaaagtcaaattccagcgtgaacttttccggcaaataacttttcatattatcgaatagcggcgcaatgaccggatcatcctgactcacgcaaagtatcaccttatcgccattgatttgagcgatctcaacagtaccttttaataaatcccactggctggggaattctcctatctgttcccgggtcacatcatcctcaaaaataatctcatcccccggcacgaagtcactcttggcatacgtcatttcgagtgattgctgtggttgttgctgttcctgctgtgccacatcttccccatcatccatagtttcaaaattcccttgtgaatttgtacttgttggtggctcctccttttcattattattattccctttccccgtcaccacatcctccgctccctcgaaagccttgtctacggtctgttccactttccgttccacgttcctctccgttgcccgtttggcactctcacccgctttcttgaggagtttctttccccattgggcttgcacgtccattgtcccgattaggagcaacatggcagataaaataaatactagctttttcatttcctttaattcattagattaataattcattcctatttatttaccgaaacaccttctgatggatcggtccagatttatcaaggatctccgaaaaaagcgagaaaccttcttacggcacgatatcccttttttacgttcttcttccatttgctcggccacttcctcgacacgtttgatccgctcgtcggcagtggcaggctcgtcacgcgagatgcgctcatcgatgacctcgatcacctcctcataagaaagcaaaggcttcttgtgtttttcttcttccatactcgaaccagatttggtgaaacgtccgatttctttattcgcaaaattagccccgagagcgatcgcccgtgaggagaaatgacgcattcttataggataatcgacgcatttcactaggacaaaccaagagaatctgcgcattgaaaataattaactaattaaagagcagtcgattagaaatgctagctggccgaatcgcctccgatagaatctatggaagaataacaatgggcattattagctccttataatgcccattgtaagcacgtcacgttgcccatcgtaacagacgctctataaacaagagttattcttgaggatggattgtacccggattggtttataatatatttccatgtacagccgacgccacccgacctatcccggtgatttaccaaagtggctatctgaccatcaaggatttcaatccggaattcaatatctataccctcggatttcccaatgatgaggttaaatatggatttctcaatttcatagcccctttctacacggaagtacccgctacacggaatcattgaatgaggcttttcctgtattgtgagggcgttacattgaagatctgcttgaaaaggcgggcgaaataattggcatcctcgaagccgcatttaagggcgatgtcgccgatcagttcctcggtagaggccaagaggcgtttgctcctctccatgcgcatctgcaggatataggcagaagtgttgtagcccgtgatggcacggaccttgcgattcaattgggatcggctcatgcacatcttatcggctaccatgtccgagttcaagccatggttggacatcaacgcatatatataatcattcaggtgagccaagaagtcttggtcggcagggtttagttttacattcagttccgtcccctcacgcatagccttggaatacttctcacgcagcaaacgacgctgttccagaaactttgttatccggatattcagctcttccgcattgaaaggcttctccagataagcgtccgccccgacttctaagccacagacacgttcctttcctcctgatttcgcagtaatgataatgatcggaatatggttcaacacctcggattcacgtacccgcctacataactcatagccatccatctcgggcatcatcaagtcggtgaggatcaagtccggcatttgctccgccgctatctccaacccctccgctccgtttcgtgcgtatactatttgatacgcaccattaagcagccggccgatataataagagtcgccatgtctcaatggcaacatcacgacaaactcagaaccaaccccggccctccatgctcctcaccatctgccgtaccaaagaaaggccgacccccgtgcccatcgtgcctgcccctccggtctcacctaggtaaaaagccttgaagatatgcggcaagtcctcctcggctataccgcagcccgtatccgccacatgcgtgacaagcatactccccacacactccatcgtcacgacaaccctcccacctctcggcgtgaacttgatagcgttgcggagtaagttatccatgatcctccggaaatactcgggcacgaaatccatgctgataatcgtctccgaaggagtaaaacaaaggtctacctgcccttggcgggcatacgcccggttatcttccacgatcatgctcgtataagctacgatatctccagtcctccattccggatcgccaatctcagatctcactttcgccacttccaataattggttcaccaattccagcaggttctttccctgccgtccaatcatattcagcccggtcttgagttcctcctcgcctattccccctttccgcaactcttccgacacacccaagataaccgtcagcggcgtacgaaactcatgcgtgacattcgtgaagaaattggccctcacctcctccatgcgccgcatcacctgctgattgcgggacttcatccgcaaggcataccataaaaagcccatcgctaccaccgtaaggaagagtacgatcaagcaagcgatcaggaaaatattcttggtacgctgccccatctcataattcttctgtatcaatgaaagctcccggttgctcctctctttctcgtagtccacacggaggttctgtatatggttcatattctcagtatttcgcatgctatcagcataagcgagacttgatgtataagcgttgagggcattcttataatcacccagcttctcataacgcaagtaatccagatgatacacgctcgacaaatgcttccacgcccgcgtcaccttagcggcaccctccgcatgctccaaaaaagcctccgccattcgcagatctcccttgtagatattcacccgtgccaaggccaggcacgattccagccaatgatacagatcgttgtccgctaccataaggtcgtatgcgttacgatattcgcgtatcgcctgatcccattgtccctttttctcgaacaagcgtcctatatggttatggcaaagcgagatgccgacaacagacccggccgcacgattatgctccatagaataattgtaataaacaaaagcggaatccatcatgccacgcatctcgaagatagagccaaggttcgcgtagttcatggccaagccgagatcactgtccaaggtacgttcctcttccagcgctattcggaaaatactgtcggccatctcgcaattttccaatgttagatacacgtttccgataccactcaaggaaatggtccggttttttcttgccttatagctttccttatcgcccagtctctcgcacaacgacaatgccctataatgataattggaggcctcgtccatgatacctaaccgccggaagttcgtaccgatattattcaaggcctgtatgacctccgaggtatctttccgttgcatagccaatcgcaagccttcccggtggcatcctatcgcctcattaaaacgggccgcttcccggtaacgtacccctaattccttataggcgagtatcactcccagctcatttgcggttctctcgaaataccttaggcatgattgtagagaatcgatgtccggacaggccgagaccacactatctatacccacctgatcattttgggaaagaccaacctctccctctcgatgacaagaaggtatcagcgagagtatccacatcaataaaatgcatataaaacaaaaatgctttatatacaaagagtgatttcctacgtatttaacaagaccaatcatcacaaatactttcagaagtaaacaaagagattcaatcgataccgcaaagagagtgtttatttcccgaatcacctaaaacaagatgtttagagaagtccgaaagctgtatattcagactgatttcatgatgaaatggagtaaaatcattaaaaagaaagagaaacgtggtagatattttttcataatgcctcgaagatgtacatccggtaagtcccgatccggatagtattaatatgaggaaagcgtgggactattaacttatttaagagataggctctggtaaacccgtacggtaaataagcaacagcccacgccctttgtccatatacgtatagcatataacaatgacgtgaagagtacagcttattctcccgtgaaaaatttaccagattttatctctgagaacgaagctaaacactttccttgtgtctaaatatgtccgctatctgacgatagcgacacaaatatagtaataaaatcagacccggaaagagtttatgtactctttttagctgttgcgtttattgatccgtatgtttttttaccgaattaagccactgggcgggagacaaaccctctacctttttaaatgccaagaagaacgtggaacgagtccgaaaaccacattcctcataaaggctatctaccgtatgaccagcattctccggcaggagcaaccttcgcttggcttcccccactcgcatctcgttgataagctcgaagaagttctgttttaagtattcgttgatcgaccgagaaagtaatttttggtaaataccggtctctctcgataatatggataaggaaaggtcctttcgcaggaaagcatttgttgtctccagatactctttcacttgggaacatatatctctcatttgttcctcgtctggtatagactgaaaccctaccgtctcatccttaacgagcatccgtgacgttccttggatataaggaacagttggatgagcaataaaattatagacgaggaagctcatcgccatcacattcaatatctgtatcaaccaagcatcagtccgaggccaaatcgcataacaggtcatcacggtgacaaacaaggcagcgaacaggatcataagtttcggaatccattccttttgcatgtattcggcatcagaccaattatcctttatatactgcttcttccggtaaagataaataaagatagcgacaaaataaccgatcatctgcgaggtaatcacggcagcgttaaaatcaccgatccaagtatcatcaccggtgacctcatgaagtatactctccatacgcttccgcataggaatggataacacgataacgacacagacaatcgccggtaaaaaatgcaacaattggacaggcttgaaacgaggatcaagatcaaagttgcggcgggtaaataaccacagcaacggcatcaacagcgtattgaccgaataactgatagggaaaaagaacaacgttatatcatgccaaccaagcatgcggctcatgttgtaaatataaacagggatgttaggaagaacgataatcgctgcggcataaccactctcgccacgaaaccgagtggcaatcaataacaacatcgccaataacaccaagataatgatgctactaaagttaacgacaagtataaattcgtggtagctcattttcttagagagggatgcccttcggttaaagcatcccccattttatttcatcttttagcataacaatcaataagctctggcgaacagtacccgacaagccgacggtttacctgtcaccatacacttacccggagtcttatctccagctaaaggaatacagcggatcgtagcttttgtctcgttcttgatcaattcctctgtctctggggttccatcccagtgagccatgatgaagacgccatcctcgatcttctccttaaattcctcatacgtatctacgtttatgatgttagcctcacggtgatcgtacgctttcttgaagatattcgcttggatttcctccaacagattcttcacgtattcctcaatgccatcacaagtgatcgtctccttctccaaagtatcacggcgcattacttcgatcgtattattctccaaatcacgaccacccatagccaaacgcacgggaacaccttttaactcgtactcagcgaacttccagcccggcttcttgttatcagcgtcatcatatttcacggaaatgcctaacgctttcaatttagccacgataccagcgaccttctcgctgatctgcgtcaattgctcagcgctacggtagatcggtacgatcacaacctgtatcggagccaaatgtggaggcaataccaaaccgttatcatcagagtgagacataatcaacgctccgatcaaacgtgtggaaacaccccaagaagtagcccaagcatagtcgctcttaccgttcttgtcgatgaaagtaacgtcgaaagccttaccgaagttctgccccaagaaatgggaagttcccgcctgcaaagcttttccatcctgcatcatcgcctcgatcgtataggtatccaaagcaccggcgaaacgctcgctctcagacttcacgccctttattaccggcattgccatataattctctgcgaagttcgcataaacgtcttgcatcttcttagcttctatctccgcttcttcacgagtagcgtgagcggtatggccttcctgccacaagaactcagccgtacgaaggaacaagcgagtacgcatttcccagcgcatcacgttcgcccattggttgcacaagataggcaggtcacggtaagactgaatccagttacggtatgtattccatataatggtctccgaagtcgggcgaatgatcaattcctcttccagtttagctgccggatctacgacaacccccgtaccgtcatgatttgtcttcaaacgatagtgagtaaccacggcgcactccttggcgaatccttccacgtgctcagcttctttgcttaagaaagacttcgggatcagcaaggggaaataagcgttcacatgaccggtttccttgaacatatcgtctaggatacgttgcatcttctcccagatagcatatccgtaaggcttgatcaccatacaaccacgcacggcggaattctccgccaaatctgccttaattaccaaatcttggtaccactgcgaatagtttacacttctcggtgtaagttctttcagctcttttgccatttctttatatttctaaattatactgttttccttaatctgaataagtaatgggttgcaaaggtaagaaataatcgtatatctttgtaaaaactatatatagataatatcatgaatatacacaagatcacacgttacttacttatgttatgtgcatttacgttcttaactctcacggcgaaagggcaagatggagagcctttgcgactggccgtggcaggagtatcccacggacatctatgggaggtgataagccgtttggatagaggcgatttcaagattgtaggagtcgccgagaaagatgattacttacgggaacataacggtctgcgggataagctggatcctaacctattctatgcggaccttggcgagatgctggataagacccatccggaggcagtcatcgtatacgagccgatccacgaccatcttcgtgtggtagaggcttgcgcaccgagaggcatacatgttatggtagaaaagccattggccgtcaataacgaacatgctacccgaatggcatcgctcgcccgtgagaaaaatatcttgttgcttaccaactacgagactacgtggtataataccaaccatgaggcattccgccttatcgacagcggtgctatcgggaagatcgatcgtatcaacgtatacgacgggcatcaaggtcccttcgagatcaactgcggaaaagagttcacggactggttaaccgaccccgtgctgaatggcggcggggcagttatcgattttggatgttacggagccaacttagccacccgtctcatgaaagatgaaaagcctcttagcgtatacgccgtactacggcagaataaaccgaatctttatcccaaggtagacgatgacgcaactattatcgtggaatatccttccgcaaccgtccagatcatgggatcatggtgttggccgatgggtagaaaagatatgcatatctatggcgacaaaggatatatttaccaagatacgcctaaggaaatgcgaatttataccaacggaaaggagcgccaagaaatagcaccttccttgaacgctccttataatgattccttttatttcttgaaagccgctgtccgtaaagagattgacgtacctcccacggacctttcctcgttggagaataacctaatggtagtgcggatattggacgctgccattcaaagcgcgaaatctaaagcggttatccagctcttttgagagtttaaaacacctctttccaatgttttagattcgtatcgatggtatccaagacctccttgcttcgcccctccatcattaacttatacatggtctgggcaaaaccaagcatttgggagaactcaatcttgggaggcatcgctaatgcgttcggatcggtcatgatgttaaccaaggccggtccgtcagcgttaaacactttctgcaaagtggggaatacatcgtcggggttgatcacgttgtagcccgccattcccattgaaagggcgacccgggcgaaatccgggttcagcatcgtggtctgccaatccggcagtccggccacctccatctcaagttttaccattcctagggaacggttattaaatacgattaatttaatcggcaaatggtattgcacgatcgtagcaaggtcgcccaacaacattgagatacctccatcaccacacaacgccacgacttgcctgccgggataagccaatgccgcccctatcgcttgcggcatggcgttcgccatcgagccatgattgaatgatcccaacatcttccgcatacccgtagcttgcaaatagcgggcaccccatacacaagtcatacccgtatccacggtaaatatggcgtcgtccgagctaagctcgtctacgaccgagatcacgtactctggctgtatcttctcttctttcccccggacagtggcggcagaacggagattttcccgaactttctcatatttagccaactgttcccgcaagaaactattatcttctttctggtgaatcaacggaatcaactcatccaaagtatccttcacatcgccacaaagccccatttgtatcttggcacgacgccccagacgattcggattgatatccacctgtacgatcgtgttgctctctggcatgaatgcctcgtatggaaaatcggttcccaacaacaccaacacctctgcctcatgcatactataatagccggaaggcatgcccaatagaccggtcatccccacctcgttcggattatcgtattggatctccatcttacccttgaaagaataggctaccggagcattcagtaatttagccaactgcaccaattccggatgggcatctttcgcacctattccacaataaagtgtcactttcttcgcgttattcaacaaatccgctaattcccggatttcctgttcggcgggacaaacccgttgtcgcgtaggaaaagaaaaggtagaggacaaacccgctgtagcattctctgccgccaagtcaccgggaagtccgatcaccccgaccccacgtgatgagatcgccgcttgcatagcgccttgaagcatccggggaaattgttccggcgtagtggctacttggttataatagctacaatcatcgaataatttgatcgtatttgtctcttggaaatattccgtaccaaactcccgggaagggatcgtggaagcgatcgccaagacccgtgctccggatcgttgggcatcatacagcccattaattaaatgtacatgcccggggccactactacctgcgcaacaagccaactcgcctgtcaactgggcctccgccgcagcggcataagcccccgtttcctcatgacggacatgaatccaccgcaatctgccgtttttccgaacagcctcgttcacctcattcaggctatcgcctgtcacggcgtatatacgtcgtacgcctgctttttccagcgtatccactaactggtccgcaactttcttcgccatagtttaaactcttctttttattttataagaaaactatcaagggctggagaaagtttttggaaagactgatttttatttgatgcaatccgtcaatgttcgtaaaaaagcgacaatcgcagtctcctcttcctgagataaacctaagttccccagttcatccttatttacggtctcgggatattccgccggggggaaatcctctacatcccttacgttataaaaatgtacgatctcctccaaggtcttgaaatatccattatggccatatggagctgtcagagcgatattgcggagcgtaggcacacggaacttcccgtattcttccggatcacgcagtcgtgagcccaagccaagatccatcgtatccttaccacacgtattatagggagccgaaaccttaaagaatggattgcccggatttgagggaatccccagattatcataggtatgatcggtgaatagcaccttcccggcccgttcgtcgggatccaagatatggcactcggcacatagccctttttccttgaaaagctcatagcctagtttctcctcttctgttaattgacatttgccggcttgccaagcatcgaacttcgaggagaatggattcatctcggcggaacgctcgtagagggcgatcacctcgtttatatagtaaacatatcaccaaatgtacgatttatttctcaagatatatgagcgatggcctctatttatggagagacatccccatgtagataccgatgcaataaggaattaaccagatgaaccacacaacaatgctaaatctgttgaaatgctgtttggcttttaacgaacctttaaagtaagtccaaatcgcccagatcgcatggatcagcatcaagcaaatagcgataattcccgttacggtatgtaccgtatcatgtaaatgggtcagttgggcgatatgctccatcaagcccgttccaatagcgtccgcataaagtcctaatacaaaaaaccaaagatgccacgcttttaactgtccttggaaacgctcgccccagaccccgatcgtatagcatatcaaggcggatgatatgacacaaatggccgtaatcagtaaatgaatatcaagttgattgaataccatatttttcctttttcaaaaagaacagaagcttcctaaaaaagttcaggctattggcaaagaattcatacattcgcgtgtctaaataaaaacgacagggcaatcccgttgaaaaatatgaaacaaaatatactcgctctctatctgatcaagttttccaaatggttctcgctcgtaatgcctatcattgtcctattctacgaggatcatggtttaggactacaagacgtgtttattttgaagagtgtctactcggtcgccgctgtcactttggagattccctcgggctatctggcggacgtatgggggcgtaagaaatgcttgattctaggttgtatacttttctttggagggtacctatgttattctttcacctccactttcacggcatttctcttcgccgagattttgttgggaaccgggcaaaccttggtaaacggagcggattcggcgctgctctacgatacaaccgtacgatataaaaaagaagaactttatttgcggtatgagggacgtatcacgatgatcggtaatttcgccgaggccatcgccgggatattcggtggattgctggccgcctattccttgcgattgccgttttacgcccaagcgtttgtcgcctttatcggcattccagcggcgttcgccttgcaggaattcaatactaagagcaaggtgcagaacccggtttccgagattctccgcatcttgaaatattccttggtcacgaaccgtaagctatgctataacatcatgttctccggtatcatcggagccgctacattaacgatggcatggttcgtgcagcccgtattgatgaagttggaaaccccgacctcctattacggtgtcatttggaccgtgctcaatctgactgtgggattgtccgccctctattctgatcaggtagagcggtatttcgggatgcgtaaatcaaacacgtttatactacttataatcgtaggtggatatatatcgctcgcttataaccttacttattggggattagcgatcttgttcattttctatatagtccggggcttcgccacaccgattttgaaaggttacattaatcaaatgaccttctcggagatgcgggctacggtcttgtcgatccgtaactttgtgatccgcttgatattcgctgccatcgccccatttataggttggctaaatgatttctattctttacgtgtcgccctgttagtttccgccggaattattgccatacccggaattttattcttagttttgcaattccgtaaagcagattaaaaatataatagcatgaaaagacaacttatgaccggactgtttgccgctttggctttcacagcggtagcccagtcgaatgagtggcgagaccccgaggtcaacgccgtaaaccgtgccccgatgcacgccaatttcttcgcctacgagaccgccgaggtggcagcgaaggacgccaaggaacaatcccagaacttcatgaccttgaacggtccttggaaattcttttgggtaaagaacgctgacgctcgtcctaccgatttctggcggaccgattacaacgacaaaggatggaacaatatgcctgtgcccggtgtatgggaactgaacggatatggagatcctctctacgtaaacgttggttacgcttggcgtgagcaattcaagaacaacccgcccgaggtccctaccgttaataaccatgtgggttcctaccgtcgtgagatcatggttcctgccagctggaacggaaaagagatcatcgcccatttcggttccgttacctccaatatgtatttgtgggtaaacgggaagtacgtaggctatagcgaagacagcaagctggaagcggagtttaacttaactccttacttgaaacccggacaaaaaaacctgattgctttccaagtattccgctggtgtgatggcacttatctggaagaccaagatttcttccgttacagcggtgtcggacgtgattgttatttatacgcccgtaacccaaagcaacagatcgccgatatacgtgtgactccggatctggacgctcaataccaaaatggctcgttggcagtcaacctgaccatgaagggtaaaggtacagtagagcttgaactattggatgcccagaataaagctgtcactacccaatccttgaacgcttccggaaaggtcagcacgacgatagaagtctcctctccccacaaatggactgcggagactccctatctatatactttacgggctactttaaaagagggaggcaaaacaatcgaggtaatccccgtaaaagtaggtttccgtaagatcgaattaaagaacgcccagatactcgtgaacgggcaaccggttcttttcaagggtgccgaccgtcacgagatggatcccgatggcggttatgtcgtttcacgcgaacgcatgatacaggacatacagatcatgaagaaattcaatttgaacgccgttcgtacctgccactatcccgatgacaacttctggtacgatctttgcgataaatacggtatctatgtcgtagccgaagccaatatagagtctcacggaatgggatacggcgaggagacgttagccaagaacccatcttataagaaagcgcatctggaacgtaaccaacgtaacgtccaacgtggcttcaaccatccgagtatcatcttctggtccttgggtaacgaggctggatacggtcctaacttcgaggccgcttacgactggatcaagaacgaagaccccagccgtgccgtacaatacgaacaggccggaaagaacggaaagaccgatatcttctgcccgatgtattacaactacgaggattgcgctaaatacagcgaggataactccatgcaaaagcctttgatacaatgtgaatacgctcatgccatgggtaactctcaaggaggtttcaaggaatattgggatttgatccgtaaatacccgaaatatcaagggggcttcatctgggacttcgtggatcaatccgtgcgctggaccggcaagaacgggaaaatgatctatgcttatggcggcgatttcaataagttcgacgctagcgataataacttctgcgataacggcttgatcagcccggatcgtgttccgaacccgcatatgtacgaggtggggtattattaccaagatatctggacaacccccggcgatctgtcgaaaggtgagatcaaggtgtacaacgagaatttcttccgtgacctttccgcttattatctggaatgggaaatgctgaaaggtggcaaggttgttcgtagcggacgtgtcgatgacctgaaagtagctccccaacaaacatcaacgatccgattggatctaggcgagacttgccaatgcacggaatggttgctgaatgtatcttataaactgaagaaccgtgagggcttattacccgccggacataccgtggccaaggatcagctgacgttgaacccgtacaaggctccatctatggatttgaaaaacgtggaaacaaccaatatcgaaaccaaggctccagccgtacaagataacgacgccaattacctgatcgtggaaggttgtggtttccgtaccgaattcaaccgtgagaatggttacctgatcaaatacgaggtaaacggccaagacatgatcaaggaaggagaggctttgactcctaacttctggcgtgcgccgacagacaatgatttcggagctggcctacagaagaagtacgccgcatggaagaatccggaaatgaagctgacttctcttaaccaacggatggagaacaagcaagtgatcgtagaggccgtttacgatatgccgaccgtatccgccaagttgaacttgacgtacgtgatcaataacaagggtgcgatcaaggttacccagaaaatgacagcagacaagaatgccaaggtatcccccatgttccgcttcggtatgcaaatgccgatgccgagatatttcgagaatatcgaatactacggccgtggtcccgtggagaattatatcgaccgcaagggtaacgcggacttggctatttaccgccagaccgtagacgagcaattctattcgtatatccgtccgcaagagaatggaacgaaatcggatatccgctggtggaaaatgctgaacgaggctggcaacggtatcgaggtcgtagcctctgccccattctccgcttccgctttgcattatacgatagagtctttggacgacggtgcccgaaaggatcaaagacactctccagaagtagaggaagccgacttgacaaacctttgtctcgataaggtacagatgggattaggctgtgtaaatagctggggaactatcgcactcccggaataccagattccttacggcgactatgagttcacgttcattcttactccggtaaaacatagcatcgagatcgagtaaaacgaatcttttatctagtgagagatatatgaaagaaggggaaagcaatagatgttttccccttctcacgttttctatcatcactattctttaacaggcacagcctacaaaatccctgaacagctccaccccctttatcagcgaggaacgtggacaagcgatattccaacgcatgaagccttcgccttctgctccatacatcgttccggcattgagccatagcttcgctttctcgatcagcaagtgctccaattcttccgatgatttacctaacttacggcaatccatccatacaagataagtgccttccaacaaggttatcggaaagtccggcagatatttcccgcaaaaatctttcatgtataagtaattctgccataaataatcgatcagttgcgacagccattcctctccctcattataggccgctatggtagctattacaccaaaaggattcacatcgcatacctcgttgatattgattgcccggtctatcttccgacgtaggttctcatcgtaacacacgatattggcgatttgtaatccagcgatattgaaagccttgctaggcgacaggcatgtcacggaatgccgtaggaattcttctgagatagatgcaaacggtgtaaaagtatatcccggaaatacgagttcgcaatgtatctcatctgatacgactattaggccattacggatacagatcttgccgatacgacttagttcctcacgtgtccatacccttccagcgggattatgaggattacacaacagcatgacctttaccttcggatcagcggcttttttctccaaatcctcataatcaatcgtgaatgtatcatgggcataagacaaaggggtgcggataatctcacatctgttattgcggatggacgagaaaaaacagttataaaccggagtctgcaccagtactttatcacccggctcggttagcgccttgataacggcagaaattgccggaacaactccggaggtacaaatcatccattcttttcgtatttgccatccatgccgacgttcaaaccagcctgtcaccgcttcgtaatatgcatccggtactcgagtataaccgaaaataccatgttctacacgttgccgtaaggtttcgataataacgggtgccgtacggaaatccatatcggccacccacatcggtagaacatccgtatccacagcgctatcccatttataggagttcgtaccggtacgaggcactatttcatcgaagttatatctcatattctttatgcggaaaagcaagtacgttcattccatagcctcagttggcaattacccggagccttaatgttctcgtcgaggattacctcaccatagcttccggcggtgatgcttcccgtacggggattcttcacgctacggatcgggctattgatagtcgcctgcacggaactgtattcaaaggctagatcgcaatcatctgccatcgtacagttctccatcataagatcgtgggcgtaacaaagcggctgtgtacccgagattttgcaatttaccaaacgcaggttcttcgagtgccatcccaagtactcgccgttaatctcggaatcgtatacggtaacattctccgtatcccagaaagcgtctttcgagttgatgaccgcattacggatttccacgttcttacaatactggaacgagtagtttccattttgagcgtagttccggattttaatgttctcgccgtgcataaataaataatcagcatgatctatttgcacatttatcaattccacgttccggcaatgccaaagggtttcttgagcattgggtagttgtacgttttccagtctgataccgtccatctcccgaaacatctttggggcttccacccgtgtatccgtcatcactagattttgggagtaccataacgcagcacgtccaccttcggtaaacaggctattcttgatggtgaagccatccacgtgccagaacggatatttaccctcaaaacgacagcctatggctatgatattgctacactctttcaatgccgactccccggcatgaataacgacattgtctaattgtaaatcgtgagaggcgaacaaaggacgctcaccactaaattccatatcctttatctgttgcataatgaatcttatttaaagttttctacaaagaaccgttcaatcttatcgaagggaatgacactcatctgatcgtataaatcgacatgattcgctccgggtataattagcaattccttattgtcacctttcagtttcttgaaagcatcctcgctgaagtaacgtgaatgcgctttctctccatgaataatcaatacggcgctacgaatctcgtcactatacgagagtataggcatattgatgaacgataaagccgaggtcttgttccatccgccattcgagttgagcgaacgcttgtggtaaccacgcttcgtcttgtaataagcgtagtagtctttcaagaattggggcgcatcgtcgggtaacgtatcgggcaaacctcccgcaagggcgtatgagccgttctttgtgtcagcggtacgctgttcattgagttgcttgcgcaattcataacgtgcgtcggcatccatcgcatcgaagtaaccattagcgttcacacggctcatatcgtacatcgtagaggttacggtcgctttgatacgagtatcgatagccgccgcattaagagccatgcctccccatccgcagataccgaggataccgatatgttccgcatccacatcatcacgtgtcgaaaggaaatcgacggccgcacagaaatcttccgtattgatgtcgggagaagctacataacgaggctctccgccactctcgcctgtatatgacggatcgaaagcgatcgtcagaaatccacgttctgccaatttctgggcatataaacccgaggattgttccttcacggcaccgaacggaccgctaatagcgatagcaggcaattttccatccgcatgcttgggtttgtacatatcggcggcaagcgtaatgccatagcgattacgaaaagtaactttactatggctcaccttgtcactctgtgggaatactttatcccaatccttaattagattcaaattcttgtccattgtatgatcggtattaatttgattgtctgtagcgaacagatttcccgtagcgcaaaagcatatggctattgccgtacataattctcttaatgacttcttcatgtcgttccttatttatttttacgaaggcaaagatagaggctcaaatagcatccctttgtagacaaattacggatgtcatgacctcaattacaggttttgtggaatcagccagaaagcctgtaaatacacataatccgtaacaatggttatataatccgtaattagggttataactatatatgaattatcctctatttttgcgtacagaattattgattaaatacgtacggcttatggataagatacttaacttagatagtgtagacctatataacaaactatacggcctcgaaaccctaaatccgcttgtcagtgtcatagatttgaataaagcgacgagtagtgtagatctcatccgcttcaattacggcatctacgcactgtatctaaaactagagaaagcctgcgatatcaaatacggacgccagacatacgattaccaagaaggcacgatcgtttgcttcgcccccggacaaactgcggaaacaaatccgacaaccgataaagtccaagtaaacgcacatggtattcttttccatcccgatttactgcgtggaacgtcactcggaaagaatataaagaaatatacgttcttttcttacgaggtaaacgaggcgttgcatctctcggaagaagaaagatctatcgtgatggattgcctgaagatcatccgtatggaactggaacatggcgtggataaacatagtaaaaccttacttgtaaaccatatcgaactgctgcttaattattgtatgcgtttttatgaaaggcagttcatcacccgaggcaagacaaaccgggatgtgctgacacgtttcgaaaacctgttggatgagtatttcgaaagtacactcgccgaacaggacggattgcctacggtgaaatactttgccgacaagctttgcctctcatcgaactatttcggtgacatgttcaagaaggaaaccggcaaatcaccgcaggaatacatccaagagaaagtaatcgagctagccaaagaacgtatctccggcacggcggacacagtcagccaaatcgcatattccctcggtttccaatatccgcagcacttctgtcggctattcaagaaacgggtagggtacacgccaagtgaataccgtgcgcagatcggtctatcaacgaatctatagaaggcgttcaagaagatgttagatattaagactgtatatgaatgtaaccggtgcttgggatgcaagacgctgcacccacaagtaagcctcatcaatctagagagcccgaacctagagcaagaggccgtaaagttcgagttctacgcgatcctcttgatagaagactgcccggacggttgctattgttgcggacgtaagtattacgattattccaacgctacgatggtgtttcttacacccggtgagattttccgcatgagcgagaataatacgctacccaacaaagggtaccttttagcgttccatcccgacctattgttccacacgtcattggacaaccctattaagaactataccttcttcgcttatcacaaagaagaggctctgcatctctctcaacgtgagacagccaaagttacgtgttgtctggaaaacatcgaggacgagcttcaccatgccatcgatacgcacagtggtaccattctatcccgccacattgaattattattggattattgtacacgctattatgagcgacagttcattacccgggaaaataagaacaaggctatcttggagaaattggaaaggctcctcgacgagtatatcatttccggtaaattagagaacggccagctacccaccgccgaatattgtacggcagaactggacctttctgtcgcttacttcaacgacctgttaagattcgagaccggcaaaacactggaggaatattttcagttcaaacgattgagcgtggctaagacaatgctactgaaaaacggtaatactcccgctttggtagcacgacaattaggttatccgaacgtacagtatttcagccttatatttaagaagatcacaggcatcgctccctgtgaatatccatatgcgcaaaactaagaaacggaaggaatgacctccttccgtttcttagaatgacattattttcctagcttcttttccagcatcttcataaaatatcccccgacaaccgaacgggcttgaaaacctcgttgcgtaccatcggaagtaaaatgccaatcgcttagaggaacacgtgaagtcgtctcgttggcgtagttccagaccggaaccatcagcgcattgaaatcctccatcgatccggtcaaacaagcggaccataaaatccagtcggacttcgtataatcctcccggttatccaacggcaaaccatatttattttgttttgtcttgtaataagccatttccgtagcggcaacctcttttgggaagatattcaagcccagcaagcgatcccagaccagattatatttttggctccaagtgcccggcttatcgaaagtcaggcggtaatgatcaccatcgttcgccatcttcacccacttagcggccatctcacgggcgacttccgtatattgtctagcgatatcggccttacctaacatctccgccaattttccgtagccggcaactcccataattgccttgatggacaagttcgtgttatgggcgaaatgtccggcaaaatcatccgtacaaagttggttcttcggatcaaggccttccttcaacaagtaattcgcccatgtagtcaagacctcccaatgttgggcggcataatcagcattgccatccactattgctatagcggtcgctagcacaagcatattaccactttcttccacgggcatatcgccaccataggtttgaccgttcgcaaccggataggtacccacatcgtgagccggaaaaggtttcttccattgtccgctctcgctataatagaaaatgggattcatcattcccttcaataaatccgtgttgtatactaagaataagggggcggaaggatacgtaatatccactgttccgatagaaccgttactgaaattttctttcgaaaggaataagagagtcccttccttatcagtcaccaacttatgggcggcgatcgcctgccgatatgcgatagcgcatagctcggcgtatttcttccctcctacggcactcgtctcgctcatcaaagaagaatcgaaggaaccgcaacgccgcatcagatcctcgtaagaagcctcccctttttcgaacgcctgatgaatatccacctttccgtcgtgcttccaataaggcatccggttgtcttggaaatactggatcgaatataaatcatcgtaaccgatcatcaaatgtccggagacggtttccttggagaccttgccgatcgggtccgtataagcgaggactgtcatttgctcacgcatatccgaagagagactttgcgatccagccggtaaattaccagtagtcatgaaagctttcttcgtagcataatactcgtcgatcgttgcggagactcccggtttcttggggatagccaaatagaaatatccccagtcaatccgtacatcatccccggttttcgccagaacctcttgatcgattgttcctgtcttcaggtaaattaaatcaggggtttccgttttctcgaaagtcacctcttgatcgatcgtattcacggcccattgcggcgtggcttccaggtatagttgcacgtcgtgatctttaccgtcgatggaacggacttgataggttatataattaaacggagaagtcatagcctccagatcattcagcaagaaaggagccgtgaaaatcaagtccagactcacgccaccgcactcaaaggtatagaatgtttgcgtaggcatcacgttcatggatttctggatcgctttctcatcgaacgtatctcctcgtttcaccttccgcatgattcccatatccacataagcgcctcccccattgttccggcaatgagcggccaacacgttacccgtaggcttcaagctctccgccaccgcttccggtatctctttcagcaaatcatagtccagaccgttccctgccacggcgatttgctttccatttagatacacctcgatattatcatcatgcgaatattggaggtagagggcatccttttgctcatccgaaggccagtcaaacgtacgacgtacccagatatctcctgtagaccaaggcgtggaacgattcggattatcttccgttccgaaagcggcttttccccgcttccaacttttcggatcataagcctcggcgaaccaatcgccggcaggctgagacatcgtataatcggcctcccataagccatccgaggccataccgatcaccgaggtcacctgtatatcgtccattcccatgaaacggtatgacttaccatctactcgtataccgcctagaagcggataatcacggccggtccaatgccgtaccgactcatcattcaattgatcggcaaacgaccatgcgcttgtataggggtcgatcgtgaccaaaggaacggccggagcacgtaaagagttctctgccgccgccgtatatacctcggaaactttcacttgcgtacaacaagataaagccatacaacaagataaagccaataaatagtttctcatctgcttacttcacggttttatgaatggcctccagcacgatcttctccatgatcttatagccttccaaggtaggatgcacaccatctttcgacaggttagcgggcaatccgtttcgctcatctttcatggcggaatgataatccacgtatgtcaaaccattcttatccgcatactccttgatccatttattgagctggataaccttatcggccggttgcatacccgatctccaaggaaaatcataagccggcaatacggagcagaaaatcaccttgatatgatttgccttcgccaattctgccatagagaccaagttcccaaacacgttttccaaggcgatcacaccgttattgtgagcgatatcattgattcccgccaagatcaccacggctttcggtttcaagttaataacgtcttggcgaaaacgaactagcatctccgaggttgtctgtccgctgatcccacggtctacgaagttattccggataaagaaagtcgaatccgccggccaccatccgtctgtaatggagttccccataaataccacgttcgaaggaactttcacggtcttgttagcctccgcataacgaccaaactgagcccagtcccctttctcggtctgggcaaataacgtagtggtagccaataaacaacccgctaccagtaaagcttgtttcatgtttttcatattacttgattataaaatacaaaccaacgatcttgttttcatcaaacaaaagtaatcaaaattgtccactcacccattcacacaagaaaatatcttatatttgctgtcattgaaaaataaaaacatccgaatatgctgaaaaagattctttccaacacgatcgtacggttgatactggccgtcttgatcggacttctggttgggcttgccgtaaacgagtctgtgttaaaagcggtcatgatcgtaaaacaaattacgggacagattattttcttcttggttccgttgatcattctaggattcgtggcgccttctatcgcccgcttgaaaagcaacgcatccaaagtcttattattcgcttttagtatcgcatacctgtcatcggttggcgccgctacctttggcgccgttgtgggttatgaattaataccgcatttgcatattcaaaccgcctcggaaggtctaaaagacatccctcccatgttgtttaatctagagattccgccagtgatgagcgttatgtcggcattggtattggccgtgatgctgggactttctaccgcatgggttaaatccgaggagatggagaggttgctggaagtattccagaacatggtacttaaattggtagaacgggtcttgatgccggtcctgccgcttttcatcgccgcaaatttctgtgtccttagttatgagggggcgattacaaagcagttgcctatctttttatccgtcctgttgattgtcatcatttgccattacatctggttgaccttactgtatgtagtcgcatcgatctactcccggaaaaatagctggggcgtattgaaatactacggacccgcttatttgacagccttaggcaccatgtcatccgccgccaccttgggcacggccttgacctgcgccaagaaaagcaagatcttgcgagaggaagtaattgacgtgactgtccccctgtttgcgaacatccatctatgcggctctatcttgacggaagtgtttttcgtattgaccgtctcgctaatattatatggcagcatgccggacttcacgacgatgttcgtatttatcatcttgcttggtttcttcgcgatcggcgctcccggcgtaccgggcggtacggtgctcgcctcattgggcctgatcatcgctatcctaggtttcgacgaggcgggaacggcattattgcttacgatattcgctttgcaagatagcttcggtacggcttgcaacgtgacgggagatggtgctcttaccttaatcacggatacgttcgatcaagggcaaacgggaaaagcttccacagctttataaggacaaaacctcatggctattttactgcaacccgccttgcagtaagtggtatcacttccttttcattcgatactctatgggtgactcccccgtatgcttcttgaaataccgtcccagataggattggctgggaaagttcaagtggttcgttatctcctgcacggtcatttccgtggtacgcaacaacacctttgtctccaatatgatatgccggtctataatggtcttcgccgactcgcccgccacttgccgggtgatagtggagagataacggggagagatacaaagctcgttcgcatagaaagagacctctttctggtcgagataatgggcatggatgcaattgatgaacttatggaacaactcctccccacggttgcacccattttgctggcggctcgaaaaggagtaccttgtcttatcatacatattaaggaagaagcattgcaactggtttttcacgatcatatcacggtacacgttattccgatccatgtaaatcagccaaaacagccggatgatcacatttatggtctcctcctgatcggcgggatgcgtatagcaagggctatcctttatgaagcggaaaaagggcggatccagccggaatacggcctcgtcgaacaagaccttcgaaaaggatatatattgtaccttgaaatcctcgctactcgcattcaacgtcaggatcgtatccggtatcaatacgatcaccgtgttgcgccggatatcccatcggctcaaatcgacggatatattcgccgttcctttatagcaaaataagatcatgccatatccgctcttgtaaggacgatccaataactccctcaaatcggaatcgcctattatgaacgactctcctctctctatctcaaatggattcatatgtctactattttgcccgcgaatataagagatcattagcatataacggatcattccatctcaaaatgaacaatcatcgcctcattgtggaaacaatggttcgccgataagcgagtagctttgcatccgaaaatataggtattagttaagatgaaaaagcaaaatcgattgatgaagactgcgatcgccttatggtgtatcgtagctgttgggtgtaaacaaagccctgtaatccaacaaagttcagggtatacgacaatgaccgtattcacttcggagaaaactttatccaataattactcggcgagtatacgaggaaaacaggacatcgatatttatccgcaagtatccggctttattacaaagctctgcgtaacggaaggcgagagtgtaaaaaaaggacaagtcttatttattattgatcaagttccttatcaagcggccttaaacaccgccattgcgaacgtagaggccgctaaggcatctgtagcgacagcgcaactgacctacgacagtaaacaagaattgtataaaaacaaagtagtttccgagttcgacctaaagaccgcctacaacactctactctcggcaaaagcccaattagcccaagcggaggcacaagagataaacgcccgtaacaacctttcttacacggaagtgaaaagcccctcgaacggcgtcatcggaaccctgccttatcgtgtaggcgcattagtaagcgcaaacctgcccaaaccgctcaccacggtatcggacaattccgagatgtatgtgtatttctccatgaccgagaatcagctattggccttgacccgtcaatacggctcgaaagacaaagccttggagaatatgcccgagatagagcttcaactgaacgataaatcgctttatccccaaacgggaaagatcgagacgatcagcggcattatcgatcaaaacaccggaacagtcagcttgcgtgccgcattcccgaacgaggagcaattattgaatagcgggggctccgggaatgtgatcattccggttacatacgataactgcgtcgtaattccccaagccgccacgttcgagatccaagaccgggtatttgtcttcaaggtagtggacggcaagacgcaatccgcccccgtagaagtgacccgtgtgaacggaggacaagagtatatcgtaaacgccggattgaatagcggcgacgtgatcgtagccgaaggcgtaggtttattgcgtgaaggaacaccgattgaagtaaaacaaaattaagaacaatgaaagttagcacatttatagaacgccccgtactgtccgccgtaatttccatcacgattatggttgcgggtatcatcgggcttttcaccttgcccgtagaacaatatccggatatcgcccctcctaccgttatggtcagtacgacttacttcggggcgaatgccgagaccatgcagaagagtgtcgtagcccctttggaagaggcgatcaacggcgtggaagatatgacctacatgacctccacggctaccaactccggtaccgccacgatcacgatctatttccaacaaggaaccgatccggacatggccgccgtaaacgtacagaaccgtgtatcgaaagcgaccgggcaattgccggccgaggttacccaagtgggtgtcacgacttccaagcgccagaccagtatgttacagatcttctcgctctatagcccggacggttcttatgacgagaacttcctcagtaattacatcagcatcaacctaaaaccagagatactccgtatctccggagtcggcgagttgatggttatgggtggcgattacagtatgcgtatctggatgaagcccgacgttatggcccaatacaaattgatcccctcggacgtgacctccgtgttggccgagcaaaatattgagtccgccacgggttctttaggcgagaactcggacgagacgtatcagtacaccatgaaatatagcggacgcctgcttactccggaggaattcggcgatatcgtgatccgctccaccgaggatggagaggtattgaagctaaaagagatagcagacattgagttaggaaaggagagttatgcctatatcggacaaacaaacggtaagccgggtatctcctgtatggttttccagacagccggatcgaatgccacggaggtgaataataagatcgacgcttttcttgaggaagcctcgaaagacttcccgaaaggtatcgaggtcgtaaaattgatgagtacgaatgatttcttgtacgcctcgatccatgaggttgtaaaaaccttgatagaggccattatcctcgttatccttgtggtatatgtcttcttgcaggatatccgttctacgctgattccgttggtagcgatcgtagtttccttgatcggtacgttcgcctttatgacggtcgccggatttagcatcaacttgatcactttattcgctttggtattggtgatcggtacggtggtggatgatgcgatcgttgttgtagaggcagtccaagctcggttcgacgttggatataagtcctcttatatggctagtatggacgcgatgaaaggattgacatccgccatcgtctctacttcattggtatttatgggcgtgtttattccggtatccttcatgagcggtacatccggtacgttctatacgcagttcggcttgacgatggcggcggccgtaggtatctctaccgttaacgcgttaacgttaagcccggcgctttgcgctatcttattgaagccttacatcaacgaggacggcacccaaaagaataacttcgccgcacgtttccgtaaggcgttcaacgccgcattcgattcggtcatcaagaaatataagcacggggtgttgttctttatcaagcggaaatggctggcttggtcgctgttggcatgctccatcgtattacttatcgtcttgatgaacacgacaaaatccagcttggtgcccgatgaggatcaaggtacggtctttgtcaacgtaagtacggcctccggaagctccttggctacgactaacaagatcatgacgaatatcgagcaacggatcaaccagattccacagcttcaatcttattccaaggtttccggttatggtttgctggccggacaaggtagctctttcggtatgttcatcttgaaactaaaacattgggatgagcgcccggacaaggaagataacgtacaagccgtgatcggacaggtatatggccgtacagcagatatcaaggacgctacgattttcgccatcgcccccgccatgatccccggatatggtatgggtaacgcattggaaatgcatacgcaagacaaggccggtggagacttaacgaccttctttaacacgacccagcaatatctcgcagccttgcgtgaacggcccgagatcgctacggcttactctaccttcgatatcaagtacccgcaatggcgcgtggatgtggacgcggcgaaatgcaagcgggccggaatcactccggatgctgttctatcaaccctttccggttattacggagggcaatatgtgtcgaatatcaaccgcttctcgaaggtgtataaggtgatgatacagtccgatcctaaatatcgtctggatgagacctccttgaataatacgttcgtacgcatgtcgaacggcgagatggcaccgcttagtcagtttatcaccttgaccaaggtatacggtgccgaatctttagcccgtttcaatatgtataattcgatcgccgtcaatgccgtaccggccaatggatatagctccggggatgctatcaaagcggtaaaagagacagcggtcacttcgctcccgaaagggtatggctacgacttcggtagtatcacccgtgaggagaaccagcagagtaatacgaccattatcatcttcagtatctgtatcttgatgatttatttgatcctaagtgccttgtacgagagttttcttgttcctttcgccgtgattctttccgtaccgatgggtttgatgggtagtttcttgttcgctaagttcatgggattggagaataacatttatctgcaaaccggtctgatcatgttgatcgggttgttggcgaagaccgccatcttattgacggagtacgctacccagcgccgcttgtccggcatgagcctgacctcggccgctcttagcgcggcgaaggttcgtctgcgcccgatcttgatgaccgctcttacgatgatattcggtttgctgccattgatcgtttccaacggcgtaggcgctaatggaaaccgctcgttgggaaccggtgccgttggcggtatgttgatcggtacattggctttgttatttatcgtgccttgcttattcatcacgttccaatacctgcaagagaaactacgcccgatccaattcgagcgttcccttgattggcaggtgcaagaagaggtaaaagaggccgccgaagaaagaaaagaatatttagatagcaagaaataatctatccagttgtatatatataatgtatatgaagaataacatcatactctttgccgtagcgacgctagcgttgaatagctgcggcatttacaagaaatacgagcctgtcgccaccctcccggagaatctataccgggaggagataaccccggcagataccttctccatcgggaatatcagttggcgggacctgttcaccgatccggccttgcaatccttgatcgaacggggattagccaataatacagatctgcggatcgcccatctaaaggtacaagaagccgaggcggcgttaatgacctcccgcctctcctacctcccgtcgctctccctagatccacagggcacgacaagtagtttcaataaggcaaaagcgtcgtggacatacaacgtcccggtatcggccagttgggagatcgatatcttcggccggctgacaaacgccaaacgacaagcaaaagccgccttgtcgcaaagccaagcgtatagccaagccgtacaaacacaactgatcgccaacatcgccaatttatattataccctattgatgctggatcggcaatacgagatcacgacggaaaccgccgtgagatggcaagagagccttcgtgccacccaagcgttaatggcagccggcatgactaccgaggcggccgtatcgcaaaccgaggctacttgctactccatcgagacctctgttaaggatctggaacagaccatccgggagaccgagaatacgcttgccgtcttattgggagagacacctcaggatattgagcgaggaagattggaagagcagtccttgaccccggatctggcgatcggcatcccggtgcagctgctatcgaaccgtccggatgtacgtagcgccgagtacgcattggcgcaagcgttctacgggacagcctccgcacgctccaatttttatccctcgctacgtcttagcggcagcgcagggtggacaaacagcgcaggcagttacatcgtaaatccgggtaaactattactatcggcggtcggctccctcacgcaaccgctatttaacaaaggagcgaatatcgcccaattgaaaatagcgaaagcgcagcaagaggaggccaagctcactttccaacaaaccgtgctcaacgccggaaaagaggtgaacgacgcacttacccaagcccagaccgcaaagggaaagatcgacttgcgtacacaccaaatcgaatcgcttgaagatgccgtgcgtagcacccaattgctgatgacgcatggaaacactacttatttggaagtgctcacggcacagcaaaccctgctcagcgcccagctctcccaagtaacggatcgttttgacgagcttcaagccaccgtaaacctctaccaagccttaggaggaggcagacattaaagagagtcctttcagacttgtatataattatgattgtaacctccttttgtgcgtgacgcatagaaggaggtaaaaaaatacccggtttatggtatatgccgtaaacaatccatccactatctttgtcatataaataaaagaatccagaaacaacaaaattcatttgtatatggcaagaatagcaagacaactgaccgaccttgtcggcaacactcccctgttggagttctctaatttcaacgcgagcaagggccttaaagcccaagtaatcggcaagctggaatatttcaacccggctggtagcgtaaaagaccgcatcgccttggcgatgatcgaggacgccgaggctaaaggcttgttgaaacccggcgctaccattatcgaaccgaccagcggtaataccggagtcggactcgcttttgtctccgcctcgaaaggctacaaattaatcctgaccatgccggataccatgagtgccgagcgtcgtaacttattgaaagcgttaggtgcccagctcgtcctcacccccggggcggaaggcatgaaaggagccatcgccaaagcggaggaactgcgtgacgcgactcccggttccatcatcctacaacaattcgagaatcccgctaacccggccgtacatatccgtacgaccgccgaggagatctggcgtgatacggatggtaaagtcgatctgtttgtagccggcgtaggaaccggaggcacggtcagcggtgtcggtgccggattgaaagctcacaacccgaacgtacaaatcgtagcggtagagcctagcgattcaccggtactttccgggggcaagcccggcccgcacaagatacagggcatcggagctggctttatccccaagatctacaacggggaggtagttgacaagatcctgcgagtaacgaacgatgatgcgatccgtaccagccgggaactggccgggaaggaagggttgctggtaggaatatcttccggagccgccgtatacgccgccgtggaactagctaaacttccggagaatgagggaaaaacgatcgtggcgttgcttccggacacaggagaaaggtatctctccacggttctatatgctttcgaggaatatcctctataggcttttatcggtttatctgatgtcatagaatctgagtcgaaaacactatagtgtttgtggataaacacaatagtattcagactaaaacactactgtattcgtgcacaaatacagtagtgttttttacagattacaagagccctttcgtactcggtagctcaaaccgataaatatctcgtcggatcgccatcttgatcgagcgggccaaagccttgaagataccttctatcttatgatgctcgttcgtcccctcggcacggatattcaaattcatgcgggcagcgtcgctcaagctcttgaagaaatggaggaacatctccgtaggcatatcccctactttctcacggtggaactcagcgtcccaaaccaaccaaggacggccaccgaaatccagcgccacgctacacaagcaatcgtccatcggaaggcaatacccataacgctcgatccctcgcttatcacccagcgctttcagcatcgcctcgccaagggcgatcgccgtatcctctatcgtatgatgctcgtcgacttccaggtcgccttttacccgtaccgtcaggtccgtaccggaatgcttaccgatctggtccaacatatgatcgaagaaaccaagcccggtagagatcgatgtctttccggttccatccagattccagtccacataaatatccgtctccttcgtggcacgccgtacgacagcacgacgctcgccagcaaacagatactcggtgattttatcccaatcatccgtgatataggcgggagacaatgaggtagcgtaagccgccaactcactctctgctccctcctccgggcgcaaccagatacctttagcgcccagattatgggccaactccatatccgtaaggcggtccccgatcacgaaactattctccagatcgtattcaccggtcatatatttcgtgagcattcccgtacgaggcttacgattcggggaattatcctcgggaaaagaaggatcgatcaagatatcgtcgaacacgatcccctcgccttccagcgtctttaacatcaagttatgggcaggccagaaagtctcctccgggaaagagggcgtacccagcccgtcttggttggagaccatcacgaactcgaaatccaaccgctcgcgaatgaaatagaggttacgcatcaccttcgggacaaactctagtttctccaagctatccaattgataatctacgggcggctcttttacaagcgtgccgtcccggtcgataaacaacgctcttttcctcgtgctcataatttcatgtttttcatcgcgttcaataagctatcattctctttcggcgtaccgatcgtaatacgaaggcaaccccggcatttctgcacgttgctacggttacgcactacgatccctttcttcacgagcccattatacatggcatccgccttggcgacattcaccaacaagaaattagcgtccgaaggatatacttgataggagaaaggaggctcggacaggatcttctccagccggttacgctccgtgaggatctcgttcacttggtgcttcatggtcgcctcgtcgttcaagagctccaaagctttctcctgtgtaagctggttgacgttatacggatatttgatcttattcaagacaccgataatctccggagaggcgaatgccatacccaaacgaatacccgccgctccccacgctttcgacaaggtttgaagaacgatcagattcgggaacccggataattccttcaagaaagagggataagcggagaagtcgatataagcctcatcgatcaccacgattccctcataattcttcaagatcttatagatcgagccacgatccagactgttgccactagggttattcggggaacataggaagatcacttttgtccactcgtctgccgattccaatacggcttccgcgtccaaatcaaagttttcgtccaaagaaaccttacggcattctacgttatttacattcgctgccacctcatacatgccatacgacggcgagatcgtcaccacactatccaatcccggctcgcaaaaagcacggatcaccagatcgatggcctcgtcgctgccattgcccaagaagatcgagctacggtccacgcctttcaacacggccagacgatccttcaatttccactgcaagggatcgggataacggttatacggcatattccacggattctcattcgcgtccagaaaaacggaggcatccccatgaaactcatcacgtgcggatgaatacggtttcaaattccaaacattcggtcttactaaatctttcaggtctttcatatcgtgttcaatctaattgttactgcgttgcggtgagcatccagctgctcgttggccgccatggtttggatcgtactacccaaggcacggataccatcggaagtgatctcttggaaagtgatcttcttgatgaaactatccaagttcacgccgctatatgccttggcatagccgttggtcggcaaggtatgattcgtgccggaagcataatcgcctgcgctttccggagtatatggacccataaagacactgccggcgttctcgattcgctccgcgatagcggtgtaatccgccgtctggataatcaagtgttcgggagcgtattggttcgtgaagtctacgacttcccgcgaatctttcaatacgatgatacggctgtgcgctaatgatttctcggtaatctcctttcggggcaaacgatcgagttgctcttggatggcacgggccacgggttccacgatcgtttccgaagcggttacgaggatcgcttggctatccactccatgctcggcctgcgagaggaaatcggcggcgataaaatcgggattcgctgtctcgtccgcgatcacctctacctcggatggtccggcgggcatatcaatggcgacctctttcaggcttactaattgctttgccgccgtcacgtattgattaccggggccaaagatcttatacaccttggggaccgattccgtcccataggccatcgccgctatcgcttggattcctccagccttgaatatcttacttacacctgcgacctctgcggcgaacaggatagcgggatgtactttcccttcccggttcggtggcgtacataatacgatctccttgcagccggcgatacgtgcgggcactgccaacatcaataccgtggaaaacaaaggcgccgttccgcccggaatatataaaccgactttctcaatcgctaccgctttctgccaacaagtgactcccggggtagtctccactttctttccctcgaaacgctgcgaggcatggaacttctcgatattcgcctttgccgtacggatcgcctgtttcaagtcctcagcgaccaaggcatccgcttcccgcatctcctcttccgagacttgaagggaagaaaggagcaccttatcaaacttttcctcatacgcttttacggcgatgtcaccctgctcacgtacctcgtccaataccgtacggaccgtatcgaacaaggtggttacatccaatgcgggacgtttgattagtgagctccattcctcacgtccgggatattttataatctccatattatacaatcattttctcgatcggaagcactaagataccttcagcccccaatgattttagtttaccaataatttcccagaaatgcttctcggcgatcacggattgaacagagacccattcatcgtttgccaaaggcgttatggtcgggctcttcataccgggaagcacctcgataatctcatccagcttttctttcggagcgttcagcaacacgtacttcttgccctcggcgacttgaatcgcttcaaagcggaatagaagctcatccaagatctccagtttctctttggatagattattgttagcgatcaataaagcctcacaaggaaggactacctccacttctctcaattgattgcttaccaaagtactaccggagcttacgatatcaaagatagcgtccgccaagccaatgcccggggcgatttccacggagccgctgattacatgaatatccgccttcacgcctctctcctccaagaaagaccgtaggatcgcaggataggaagtagcgatcgtttttccctcaaaccactcagcccccttatattcctcatctttggggatcgctaaggatagacggcacttactaaagcccagacgcttgatcaatttcgcctcttgccctttctctacgtactcgttctctccgacaataccaatatccgccacaccgttagctacagactgaggaatatcatcatcacgaaggaataatacctctaccggaaaaccttttgccgataataacaggatgcgtttgcccctgtttagtttaatacctgcttcttcaagcaacatcatggtctcgtcgtacagacggcctttcgattgtaccgcaattctcaacataactatatcttatttttatattataaatatcaacaaaaaaaggcttaccgcaaaacggcaagcctttatctttttatcatgagtacatacataccattcagcccaccgaactattgcccgctgtaatgatgatggtgatataatgtagtcgttattttcatttcttttgttatttacgtcgcaaagttacaataataattgaaagaacaaatatttctgacaaaatattatcacaatatcgatattacttcaatccgttcttacgaagcaactcttctatctctttcaagcttatagattcacgttctgctttgtcgtagatgttagagcaagttgatctctgtctcatcgatgcttaacaattcttcgaccaaatccatctttaggcattttagttccattgccgtcatacaaatgctcctttcttattaattcgttctcaaggacaaatataatgatttactttaatacaaatgactcgcttgctgcttaatcttattggaaagcatcaaggggaagtccggatgcgcggtaaaaaacgcatcaacttcttcccgagcttccttcgatgtatgggcggaaagcaaggagcgaacccaagcggtggggaaaaagatatcgccagtccgctgtacttccggcatcgcttccaaggccggacggatataagcgaccgactcttgttctcgcaggcgatggttcaaatgagcgagagcggaagaggcccatggctccaccctacgattcccggcgatcaacaaggaagcgaagacactgtcacgttccgccttgcggggcgatacggatggggagataaattgatactccttcttccggtccggattctgtatgcgggataattgcgtagcgataatcttatccgctttttccggcaaatgtatcgccaatatataggacaagccaatataatcactctcgctcaatgcgcaatctttcggagctttccgttcctgccataacgtatacagacgttgtaccgcctcctccgaatccgctatcgaacgatacaaacgaaacgcctgcaagcgatgttgggatacgggattcgttgtcacgatcctccacaaggcctcttccaacggacgagaatccgacgggaatatccgctggcaatctcctaaatagcttaaagccatcgagaacaataaagaattagactcattcggtaaatacgctaacatttcatcacggaacccttgtggagaaatcgttttccaacgaagattctcataaagggtaatcagcaaagatcccttcaacacctcatcttccgataagcgaagcacagaccatagaccggaagactccccctctgttattttaaagaagccatagccacgcccatttgtattcggaagaatgacacaatttccattcggaagaaaacttaatttcattcggaaggaatcagagtttccttcgagagaaaccgggatttcttccgaatccgttccacagatcacccgataggttaattcttgcggccattttaaaccccggcccaacggatcacgctgctctacgaccaactcgccgtccttaaccgaagccgtaatctccggcatacccttctgattcacccacacctcactccaagcggccagatcctcttccgtatatttattcaagatacggatcaagccctcccacgtagcgttcccatacgcataagtagtcaagtactcacggattccctgctggaaagcctcttctcccagaacacgtaccaacatttccataaccacgggagatttatcatagatgatattaccatataccaaaccggcgttccgcaaattatccaaatcttgcttgatcggattcgcacctgacgtacggtcttccgaataagacgcgggaatataatcccgaataaaattcaaccggtgattcacgtccggatataaaggttctacgatacgggaagcaaaataattagcgaaaacctcttttgtccatacatcatcaaaccatttcatcgttacataatcgccaaaccacatatgagaggtttcatgtgcgatcaaggaactccgactcaatcgctcatttaaggtaggatgctcatccagaaacatccggcgatccgtatataaagtagcacccgtatgttccatacccccatattggaaaccgggtaagataatcacgtcatatttagcgaaaggataaggaataccagtaaagtcttcctgccattccaacgcatcgaacacctcgtcggcgatggctgggcattgagcgatctttttcggatccgtctcccgatgataaatagagatatcccgcccgttccgggaataaacctcccgagtcagtttaccggccacgaatgagaacaggtaggtactaagcggttccgtctccttgaaagaaatacgattccgaccggagacgctcgtactatccgtttgtgtgatagcgccattcgccacagcctgccaagtggaaggaacttccaaggtcaaggtaaaaaacgacttcatatccggctggtcaaaacaagggaataccgtacgtgcccggtccggaaccaataacgtatacaggaactcatcccgtcgattcaaggattgattcgccggagtaaaagtgatcgctacccggttctctcccaccgctacccaatctgaggcaatcacgatatgctcatctttcacttcatagggaatatctcctccgttcaaggttacggaggtcacttgctccggttctccgcggaaatcaataataagcggctgtttctcgtctaatcgcaaggatagctccacttttccccggatcgcctcgtcacgagattccgggatcgagaagaaaagattataacggacatttgagaaatgctccttccggaattgagctagctcaaggctcacaccgggccgggacaaaccggcctcatcttgtttaacagagctacaagcaaccagaccggacagtacgcaagctccgataaatacctttagattcatatctcgtaattattctcttaagtattctgctatacccataaaatttcgttccaacaaatacatctggctagccataaaagtgaaaaaatctccccaatgcgctctccgatgcaaatccaatccttcttttgctacatagatacgggccacttgtcggccattctcacggacaaaacaaatatcccagatcaagccttcgggaaaatcctgttccaacgtctctttataccaagtcaggcgctcaaacatttccagacgtaaatcctcgctacggtggtttacctcaagaataacgtaagccccttggcggttcgcgtcgaatttcaactcaacgccctttaccttcgtatcatataatgtccaaattttcttacgcccccgcaaatagggttgcacctcacaaaaagcggcgaagctttcccaaaactccaatttgagattcttcagttcctccttactatacattacctataaatgtctttctttgttaccttaacgatctgtccgaatttagagagtttctccatatccatactctttgaattaccgactatcgcatatatcattaaatgatcttgtatattctccctataaaaacgaaggatatcctccatagtcatccgatcgataacctccagataatccttgttcggatcgctctcgtacccttcacgccggaaaccggcgatcttcaaggaaagggagcgactagtaggatattcattattcacccaattacgaatcgtctgcttcaccgactccacccgttccggacgttccggcatatcatgcaccaaattctccaacacttccatcgcatcgatcatcttatccgtctgtgtagccaatttcatcacgaaactagcgggcttctccgatcgattcaaaggaggatgtttcaaacgggcatttacttgataagcgaacgaacgaaactcacggatctcctgaaacatcaaggatgacatatcccctccgaaataagcactaaacaaccgggaaataggacgatcttccttagccttcaacggatcgatatacatataggcatagattatgctttgcgtgacatcctccatgtccatgaaaaagacagtcggcttatcatacgtcataagatcacggatatagggagagttcgatggaatacttacctcctccaagggtaaatgctgcttgatctgccgggcggcctcctccatagacaatgtaccacaataatgcaggttacaagcgaccgaacgtaccttactgaaagtgtccagcaacatctttccttttagtttcttgatttcagcgaacgataatttagtcaaataacgggattgctccccaaatttgactttctctaacagcatatcggctacgttctcgctggaattgaacaacgatttctccgttaccttcgcctcgtccacaatctgccgtaacttcttgtcatctggcttggcgtgccgcaagaaatcgccgaccaaagccattgtttgggtaaaatgcccatcaaaaccattcaccaccaccagaaactcagaatccgtggaatcaaaagtcaatgtactaccaagttcctgcaatttaccccgaaagacctcaaaagacatcgattccgtcgctacgaaaggtagataagcggacaatttatcaagatcacgaagctccaactgccccactccataagatagtgtcagcgagaatatatcatttacggaattatgagtcttatacaacgtgacaagcggacgcaaggatacgacctcggcgtctttctcaaaatcgagaaaatgcggtttcaattcttgtacgggtatcttttccagacgttccacataagcggaggaagcatcggagttcttcggtataatcggtgaataatccggcttgggcaagatcgttttcggatagcgtccggtcttcttcgtgacgtacatataattctccgtaaaatatttcttggcgatctcaatcacgtcttctctcgacaaggcatcgatacgggtgacctcatccaaataatcctgccagcttttcccttgagagaaaatacgcatcatcacctcggcccttgagtttatgtcttccaatttggaggcatattcgcgtttctgttccaatttcaagctttgaaacatctcatcgctaaaatccccctccttaatgcggttgatttgtttccatactaatttctcggctgccgcataggtctggaaaaagaacttcggaaataccaacaagcctaatattccagcctcattcatactttggttaaccgccatcgcacccatcaccttatgatctaccgtcagcttatccaaaaatcccgtaccattggagttattcaataaagatacggcgatattgagcgcaacttgatccggatgattcgcgggaactccccggaatcccaatgccataattttcacgaaaggcataggaatacgtacgctcaccttctcccgtcccttgaatggcggtaatgtaacaatatcccggtgaggcggcttcccttttcgtatccgtgaaaaagtagattccaagattggcaagacctcctccgtatcgaaatccccgcttaagatcaatcccatattggaagcgacatagtatttctcgaagaaccggcgcatctccgaaagacggggattcttcaagttctccgcacttccgataatcggataagcatacggatgcggatagaaataacgctctgtcaatttctcgatggcgacactagccatcgtatctccatacatgttcttttcctcatagaccgtctccagctcactctggaaaagacgaaatacgggatttaccaaacgctcactattgatctcggcccattgggagatatattgcggagagaatgtattgaaatataatgtatagtcgtaagaagtcccggcattcaacttcgtaccaccgaaacgagagatcaaccggtcaaactcattcggtattacatactcagcggcacgtacgctcaggtcgttaatgatttgctgcaaatgggcacgcatcttgggatcctcggtatccgccaaagcgtcatatttctcggcgataatgtccagcaagactttctcggactcatagtcgatcgtcccgatcttatccgttcctttaaacatcatatgctcgaaataatgcgcgatacctgtgttaggggaatctttagctccggcttttacaactacggctccgaatatcttaggttggctatggtcctcattcaaccataccgtcaaatcattacttaatttatgctctcgtacctgtagaaaatctgaggttgacaacagagatctcatggaatccatttaagtttatattatttcacaaagatacatttttcaattggattaatacgcttacatttacaagcaatcttaacaaaagggcaaatttaacgtaggattgaacctatttttaagagtagtgttatatcaaaaaacgattattatgataaatttaggtagttggatgaacaaagtcctcaccggatggggtgtagacgagaaaatagcgaacacatttgacgaggcgatcatcgccatcttactagtggcggtcgctatcggattagattatttatgccaagctatttttgtcggaggggtacgtagtatcgttaagcatacgcattataaatgggatacgttattaattaaacgtaaggtcgtacattatctcgtacatacgattcccggcattttagtatatgttttgctcccgatggcttttatccgaggaaaggaattattattcatttcccagaagatttgcgcgatctatatcatattttccctgctgttagcgctcaacggtcttctcttaatgatgctggatttgtttaaccaacaggagaaaatgaaaaacaggccgatgaaaggttttatacaagtattacaagtgcttgttttcttcgttggcggcattgtcattatagcgattctcgtcaataaatccccggctacccttttcgccggattaggtgcatcggcagctattcttatgttggtctttaaagatagcatattaggtttcgtggcaggtatacagctttcggcgaatgatatgttgcgccccggcgactggatcacgatgccttctgccaatgcgaacggtattgttcaagaaataaccctaaacaccgtgaaagttcagaacttcgataatacgatctcgacaatcccgccttataatctagtgaatagttctttccaaaactggcgcgggatggttgagtctggaggacgcagggttatgaagtccatttatctcgatttgaatacgatcaagttctgtacgccggagatgctagataccttccgcaaggaaattcctttattagcggattaccaaccggataaggatgtagtacctacaaactcccaagtattccgtgtatatgtagagcgttatctgacaagtcttcctgtcgtaaatcaagatttggatttaattatcagccaacttcaatccacggaatatggtgttcccgtccagatttatttcttctcccggaataaaatatggaaagaatatgaacggatccagtcggatatattcgaccatttcttcgctatgattcctaaatttgaattgaaagtatatcaatattcagactaaagtacgtgttcggattatttttcctatcttcgtctccggattgtctacttaaagtttaaaatcgtatttatgagcaagatacaagaatgggtatataatttattagttcaaatggggttgataagcgaaaattccagttacctagacaatatagtgatcttattacttattatagccgtcaccgttgggatcgattatagttgccggtatattttcctaggtatgttcaaacgattagcgaggaagacgaaaaatcaactggatgatttaatcgtggatcgtaagatcatcaataagatgatgcatatgatcccggccatattgatttatatattgttaccattcgccttctcagccgaagagacaccgaagattttaatagtactccaaaaactttgtcagatttatatcatagcggtttctttaaggtttataaacgcttccttaaatctgatccacgagatctataataaaaaagattcctttaagaacaagccgttaaaaggcttcatacagatcttgcaggttacggttttctttattggggtgatattgattatcagtattcttatcaataaatccccggtttctttactggccggattgggtgcgtctgccgctatcttgatgttggtctttaaggatacgatcttaggtttcgttgccggcatccaattatccgccaatgatatgctccgggccggagactggatcacgatgagtaaatatggtgcggacggcacggttatcgaggtgacattgaacgccgtgaaagtaagaaactttgacaataccattacgaccatccctccttacgccttagtaagcgacgctttccaaaactggagaggtatgagcgaatccccgggccgccgtatcaagcgctctatcaatatcgatatgaacagcgtacatttttgtaccccggaaatgctagagaaatttcgtaagatctctcttatcacggattacatcgatggaaaagaacaggaattagatgaatataatgaagaacatcatatcgatagttccatttgggtgaacggacgtagacaaacaaatctgggtgtcttccgtgcttatctcgtacgttacctaagaagcctcccggaagtaagtaaggaattagtctgcatggtaaggcatctacaaccgactgatacaggtattcccatcgaactttattgcttctcatccaataaggtatgggtcgaatatgaaggaattcaagcggatatattcgaccatgtacttgcagtaataccggagtttgggctaagcgtattccaaaatgtatccggggcggatttgaagaatatcatcatcaaacttcccgccggctcacaaccctcagagtgtttctagaaactcatgtacatgtttttccggaaatgataggaacactctaagatgtcaaaaaaatatcttaggtgcatcggccgacgatcctaagatacttcgccagtgaacctaagatacttcagtaatgaacctaagatactttgcctatgaaatcagtatcggcgtagccttacggcactagtggtgtagggttgtgcctatactggcgtgaggctatgccgatatatgtatttgtccccttagaattggaaataaataaacggctgcactcccgcactcttaaactgaacaacaatgaaaatcgctatcgccaatatagcggcctgtatcaataatggggaacgggtcacgactcctctcaaggcatcctcagagcgtttaggcataaaatgcagcacataaccgatcaccatcagcgcaaacacccctttatatcctaagacgaattgcatgaacacctccggatgaaaattcgtgaagatctggcgaagcatctctcccacggccttcatcgaggtagctcggaacaagatccatccgaaacaaaccacatggaaagtaatcaggacacctaatacccgtcgccaaggcttcatctcgcatcctaaggccttaaagctactgaaatgccccatgatgaacttatgcgcagccaaagctataccatgtaaggctccccataagatgaaactaatggaagccccatgccataacccgcctagcagcatcgttatcatcagattcatataggtacgaatcttccccttccggttcccccctaaggatatatacagataatcttttaaccaagaggaaagggagatatgccaacgacgccaaaactcggtaatcgtagccgattgatagggagagtcgaagtttatattaaagcggaatcccaacaacagagcgataccgatcgccatatccgaataacccgagaagtcacaataaatctgtagcgcatacccatagacacccaataaattctccacacccgtataaagcaacggagcgtcaaaaatacgatccacgaaattcatactgatataatccgagataaccgttttcttgaaaagaccacataagataaggaacaatccctcaccaaactcagatcgcgtcaccgtaggattcttatacatttgagggataaaatcccgggcacgaacgattggcccggcaaccagttgaggaaagaacgatacatagaaaacataatcgatccaacggccgagaggttggattcgtccccgataaacatctatcacatagcttatactctggaaggtaaagaaagagattcctaccggaaggaagatgttcatcttaagccattctcccccggcggccatagtaaacagttcgcctaggaaattgaaatacttgaaataccccagcatacctaggtttatgcagagactaagcgtaacgaataatttacgttttaataccgatgtcgtatgcgagatacattgcgctatcaagaaatcggaagtagccgtaaataccagcagcccgaaccaaagtccactacttttataatagaaataaagggaaaacaatgtcacataaataatacgagccaacgtatgtttccttagcgacatataaatcatcaggaaaccgataaacaagaagaagaacaacccgctactaaacaagatcggggcattatgatgatacgtcaggatatctcccagtttctcccacgtgaattgatgattactaagccaatctctaagtatattatattccatataagattcttatcggttattatatgattccatgaacgccctaaacaaaagcgttccttgttcttgatacccttctttcgtaaagtgaatccgatcccgtcccatcaaacgagaactatgccatttgcggcacgagtttttccctcccgtcgtagtgaataaatcccagcaagcgacctcttctttcttcgctacattccggatagcacgggcagcccgctcggtattatcattacgcacatacgttcgctgttttcccgaccggactctcctataacattccggaggagtcgtcagtaagatcgccgtattcggcagctccttcttgacgatcgccaagaaagcctctatctgaccggaaaactcatcggtattaaaacgtctgccgaatgtctcgttggtccccatagagatgattaataaggacggttttaataaagccaactgacgtatataagcctcgtccgtataattcacatacatcgccccattcactccgatggaatggtataagatacccttgcctccattcttcagtgtcaggccataatataaattcgtaaaggatgaggccggtcgcaatgtattcgtgccctctttccgtctcgtactctgcaattgtagagtatcggtcaagcaggagatccggaaagtgtcggctaatacaccaggaacacatacggtatccgcacggaatgtttggaccgagtctttcaaagcgccagcaggaagcatgggcatcgacttctcccctctatataagatcgcctcattaaactcgtatccggcaccattattcggagttatcacgacatcaaaattaatcgagggggaaacagacttaatcccgatcccaccgatccctatcggggttttccggacatgctgaatacaacgtccggcaatccaatccttagcgacggatttgataaagtaatcatccggctcgttggtcctgctcaacttaaaaggagcgatccagcctcgtccggcattcccgaacgcctgttggaaaaggcgcatgacacgaccgcttaaatgtccggcttggatatgcgaatcccccaactggacgatcgtgatagccgtatctttccctgcacgcaacgaatccagttcattgaaaaaattattccacgccttactagaatccggtaagatcaacgtatcttttcccactttcatagaataagataaaggaggcaacgctacagtatcccgaaccgccaaactatcaagagatacatccccgtttattccggctttaggtttcggaacagagaagcccatgatcactcctaaaacaaccagactaattaaccactttctccgcttcatcataaaaatctttttctgataataacgctttcagcaaggcatcggcaatctcccgtccacccctgaagcttaaatgcgtataatccttactagcccagtttaattctacgaaacggaccatactattctctcctcccatggcaccgaatacattccagaaaggaacccctgcctttttagcagcttgcctttgcgcatgcagcaaggctaacacggctggcatcgtctcgaattcgccatcgtcttgacggcttctgtccgacacccccaacatcaatatatcagcttccggaaaacaaagttgtatatggttaatgacctttaccatccggctactataccatccataattcatcacgctatcgctcacgacattcaacccatactgcaagacaatcaagtcatacggacggatcttattcaatgcttggcaacgggagacatccaatcgctccaatatcatacccgagtttccccgaagagagaaattatcgaccacaacacctgaatgatcctccatagcgacccctaatgcccggaactccggagtattcttaaaagtgaaatccgcttcggtgaacatcccttccaactcgtattgggttacgatcgatgtggcgggaagcatctcttgtagggtatcggcggaagcgttgcaaaccaagcgcatctccgtattcttattctgctcataaatcagtttcaaagaagagaacgtctggagctccggataacgcttagtcgtcttcacatggatagaggcgttctcctcgtttgcctcgaacatcatcccggataaagtatatccatgctcatgatctgtcagcatagaccaagtagtccatccggaggcacgttgctccacggttggacggaactgtgccgctacggatgtgaccggtacaaaaccaacaccccgccccccaaattccttctgcatcccggaacggaaatcggccaccataatatctccttcgataaaagaatctccaaggaaggccacacgtaccggacgattcaattcccgcctgttttttaaggcggcgaaaaatcgttgcaaaccgatatgtccaagagaatagtcctcgatatgagcccccagcgaatccgccccttgaacagcatagaccgctttgtataacgaatcacgaagggccaaagccgcagaatctattccggcggaacgcatgatagaatcccttaatgctaccgaatctacttgaagggtgtccgcttgttccaattgttgtttcaaagaatccaaggagagcttttcctctttcaccttgaaatccgataaaagatctacctttttgatcttatacccgaacaatgtatccggaaggctatataaaccaaagctcatcaacaacgtcagcgacagtaacgctaacactctacccaaattattatctttgttcatctaacttttgcttataaggggacaaagatagacaagtttacctacccggaaataatcttcggacaaaaaataaccttaaattatccgttcagggtggatcatcccttaaacgtaagttgagacaaaaagagatgcaataacgaaggctccagcagcattgggaaaatcaatccataaatagccccgtagaaatgggcattatgatttatgttatctcctgtttgtttcgccatatactggcaataggccagatatagcaagccgaatacgattccggggacaggcagcacggcgaaaaacaagatctttccccaaggatcaaggaatatagaggtaaatagaaccgccgataccgctccagacgcaccgatagagacataatacggatcattacgtcgttttatcaaatcataaagcgaagccacgatcattcccccgaaataaagagccagataagcccctttgccgaatcccatatatcgaaacgttcgttcaatatagagaccaaatgaccagaacgtgaacatattcactagcaaatgtgtcatatccgcatggataaatccatgtgtcacgatacgataatattcatgattccggatcgtacgatatgggataaacgctaatttcataaataactccctattactaaaacagataaaagagagaaccactgttattccaataatcaaataagtaatcatatattctattatttttctgatgagccacaaagcaaagcataaattccggtttatacaaatatcaggtatatattatctaagccaaaggaaaaacaagaatccccaaagaaaaacagataacagtaaaaccaaaggcttcaaaactttatcgcaaaaatagctccttactttctttcgataaggaatattttccactgcgataacacgattcaccttattcgtcctatcaaaataggaagaatatagaatcaatatataaaaaccgaatatttgcaaaagaaataggatggagactaatggcttttcatatcttttctgtttctcttctattttaaattgctttaagtcaatctcttttataacccgaatcaatgttttcttttcttccaatattaaagaatctagattctctgaaaaagaagaatctagactttttaaattctcatagtaccggaccatactatcaattctatttctttctgtattcaaagaactcaatttcatactttcagcagtcatatctatatatgatatagaaaaagggaaaagtaagaaagctaaagacaacacattaccactaataacaacaaatgttttattcaagcctctgtttagttccttccaaaaaatatttgtcaaaaagaacacactaagctgtataatacaagcaatacataaagtacgtatggtataccccactaattgcagccaattctccatcgcttctacatctacagtaataccaaagagggtcaccgcataaatcaatgttataactatcattaatctatgttctttctttaatccaagtaccagatcaaacattctttcccacatactatccttatattttttcgccaaagatacaaagattgctttaagcacatggtatataataaaaaagtggataagccttttctcatatccactttttatttgttacttgaataagaagctatttcttgctatcgattaccaataacggagtatcggtgtggaataacatctttctcgcgatcgaaggattgaacatccgggctaggatattacggcgatatgtgcttagggctataacatcaatttgtttatcacgaacaaatttctcgatggctaacagcaagtcaccatcggctagaaccgtatgggaaatatgggcatgtggatattgtttcttgaaatattcacgaacgcccgttaaacgaatctcattccattcatcattactggtagagatattgaatagatggatattaagatcaaagcctttgatgatttccataaactcgtcaaacgcaaccaaatctctctggttaaacgatgtcgcgaaagcgatattcttagcgtctctcaaatccgtgaaaggaacattctccggtatcgccaatacaggaacccggttcacctcgataacctctccggtcacgctaccgatcagatccatatctttttggctcttacctctcgttcccatcacgatcaatgtcggatgatactccttactataagcgatgatctcctcttccggcaagccttcacgtaatacataatcgtattttacctttggtaattcaccagaggacatcttccggttgatatgcgtacaaatattctccatatcgatacggacacgttgtaagatatgctgtacggattcctcctcgtttacttggtaagccaaagtatctcccatcgggatagcggatggaaaataggggctgaaataggcgtgcatgatcatcacctccgcacctaccgcatgagcgtaattaattcccaactcacaagccttggcggaataatccgagaaatcaatcgggatcagaactttcttgaccgcattaaccttcgcctcttcctcctttggttcctcaaaccacttattgtcttcaataatgcgtaaagcatgcggtaaatcactctccttaatacgcacacgcactcctgccgaaacgaccggctgaatctggtttacattatgtatatagacctctatgccttctgtttcgaggattgtcttgagaatctgggctttctcgaacgtgtggatagccaatgtcactaatttatcttccatactcaatacatttttatagatgaaacaatcgggatttatgaattgttgaatataaaaaaatcccaaagcgttctttcatttagctatgggattttttatacgaatgaatttctcttacgctttttgtgcttcggcatcctgactctcggccagtatctgcaaagcacgctcgaaaatagtcgtgtcatctaaaacaaccaaccctccgtccggaccgggctcgatatggaaaccacaactccgtccatcttgaaaattatgtccaccgaaatagttacgaactgtctctacctttaatcccagctcatcggcgatgcgttgtgtacttccgtcaggtaacgaatctttaattcttctcagttcgttaaatgtaatcgtctttgtcatggctttcttattttgaaggttaatacttttgtttaatattatggcactaacttagtcatttaatagcattgaaacaaattattattgaaaaaatgagctgaaaacaaatatgctttacgacatacttaacggaaatctcttatattaagcacgataccaattgcccattaaatagggctattaaaaggatggtaaaccaaatcgcataggtgatccagcgtttccgggtatccgagtaaatggcctccggacatacccaagaatctgccggaatcaatttaggccttatatagtggtataacagatatacaagatacccgaatagcagaccggataaagctcccggaataatatccgtgataaaatgcactcctaaataaatacgagtataggaagtcaaaatcgcccaaaagaaaatagtccatccgaatagtttattcctgaagatcagcgccatcaaggtcgcaaagccgaaagcattcgccgcatggctggagataaatccatacataccgccccgataaccgaacaccacccttacctgatccataaagtcagggtgatgagtcggacggaaacgggtgaagatgggtttacaaacatgcgaagcgaactggtcgcatagcgtgatcgtcaagacaatggccaataagatcaacaaccactccttccagttcttcttatagcacaataccaccaatataaaaaaggctaacggtagccaaaccgccttgcctgaatagatccacataaagcgatctaaaaaagcggagtcgctaccgttaagcataaagaacgcatcacgttcccaaaccaataattgttctagcatgtatcagattttttctatgtctttactaggcatccatcctacgttcccgtcctcaagctcaatctcgctccattcgccgagcgtgctcttcacggtcacgttcgttccctcgtgtaatacgaaaagatccgtaccgctagcgtcgggcgagcttttcaccgtaacggtcggggcgaatacgatagcgtgtttacggtttatcatctcatccttctggtcgctggcgaatatattggcaaaaacaaccatgataataaataggacacccaaatagaaaccgatcttcttcaagcgtacccaacgagagaaaaagaacaagatcaagcaaccgataaacaacaggaagcacacgatacctgtcttcgcccaagagtctgcggaaccgaggttctccacgctcttaaaccatttgaccaagaagaaatcaccaaccggctcaatcttatcgatggtcttctgacgggccatctgtaaattgaagcgagcatcgctatcacccggatccagcagaagacaacgttcgtagttcaatatagccggagcgatcttacccgccttataataggtatttcccaaattataataaacggcggcagactcgccattgctcttcaagattccctcatatagctcgatcgccttcgcgtaatcttctttcgtgtaagcgacctcggcctccttcaaggcggtatcttgcgcataagcggatcctatcagacatagagtcaataagaaaaacaatacctttcttaaatttatagtcatcttcatcttcttactttttaattgtattctccattttaccaatagcgtctaccgtcagctcatacagcttatccatagcgtctgacgcttgggacggagcgtaacgagcgaactcacaagtattcaagatatccatgaactcattcgtcaaggattcgtctacaccgtatttagccaattctatctctacgttatccttggtcagatcggattgcgggatactcagcttatcgctcaaatagccccacaacgcacgcagcacctcgtcgtagaattcttccttcttattctctttcatcagcttgccagcgttcttcagacgtctaaccgccatcttgttcgccttcttggtacgaaccaaggcgatgtcggcgttttccttcacctgcttacgataaataaagaagaatacgataaacaagatagctggtacgatatagcaaagataatacataaaggaaccgaagaaaataccatcacctccctcgataaaggagaaatctttcgtcttcaagtaacggatatccttgcctaagtatttcacgctctctttattactaaagttcgatacgaccggggaagaaccgctaccgcccttaccttgctccacatgcaacttataaggctcggacttgatggtcttgtacgaaccggacttgatatcgaaataggagaaagcgatcgccgggatctcgaaatcacctgcgtaacggggtatcgccatatattcgatcgtcttgcttccactgacaccggcggtcgtggtcttgatgtccatctctactttcggatcgtagacatcgaaatcgttcgggaaaaccacttccggattcttcaccaacttcacgtttccgttacccgtgattttcacctttatggttacagcctcgtctgtcttgacgttgttcgagctgatatcagccgtcatggagaacgtacctacggcaccggagaaagaagcgggcttaccggagggcaaaggcttcacgtcgatagtaaccggagaagtggtcaacaccttgctcacatcccgatacgagtcgaaaaaactatcgaagatgctaccgccgcccgcttgttgcatacggacacgcaccacggcatcatactttccaccttcgatcgtgatcttaccggaacgttggggatacaggatcacttgacgcattacggccgactggtagttacgcccgttgtagttttccaaggtcagttgtttctcttgcggcaactcaacctcttgtaccaagaaaccctcgaactccggatatttcaatcccgtaatcgagaaattttccaaggaatagaccttgaaagtcaccaagaaaccttcttgctcgaacacgcttcgtttggatacgtccatcttcacgaacagccgatcgttagagatcgccccgctcgccgtcgttgtctccgcctcttgcttacccgccttatcagcaggaagcaccttgatggccaagccattcgatgtataattagagccgttcaccttgatcgttgccggagctatattaaacgtgccttccttcttcggcatcaagacatacgtatacgtaacggttgtctcgctggtactcttcccgttcacccagctactgctataggaggtggattgggaggggcccatcaatacgtcaaagtctggcatctcctgtactctcaaatccttgccttcggcattgacggtgaaagtcaagcgaaactgctctcccattaccaccgcttggggcgccgaggccttgaaggtcacatccgcggcctttgtcgccactcctaccgctaacatcaggatgaataagaaaattaatttcctcattgtgtatctcattttttcgttaattatccagtttaccactccttctcggtcttccggcgttgttgctgctgcatctgcgccttcttcaccttctcttgggtgtctttctcgtcttgcaggaaggcgtccaacatctgctgggcattgtccttgctcatttgctcgttggattgctgttgctcttgggtcttatcctgcttctggtcgtcttgcggctgttgttgttgctgttgctgctgatcgtccttctgatccttgttctcctgcttgtcgtcgttctgttgatcttggctctgatcctgattctgctgatccgacagcagtttctgggccaaggccaagttataacgggtctcgtcatctttcggattcaagcgaagcgattgcttatacacctccacggccttaccgtaatccttgttctgcatgaagatattccccatattatgatacacctccgacaagcgtgccttcccttccggcgtagccaccatcttctccccttgcccggcgatcaattgatattgctcggcggcctcggggaacttgccttgcttgtatagggaattccccagattataggttccttccgtagagcggggattcacctccaagctcttgcgataagcgatctcggactcggtgtatttctcgctctcataaagcttattcccctcacgcacgttcttccgttccgctttctgggcagagaccgccccagcgctgagcgccaagaccgatacccatatcatagatttatatatacgtctcatcacttcgtcgaattaagagaataattttactttcctaaatatacggttcttacgatccaaggtcatgaaatcggcgatcaagaggaacaaagctatccaagcgaaaatctggaactgctcgtcatactcggaatagaccttgctatccagctccgtcttgttcattttctcgatttctttctgaagggctttcaaggcggagttcgtattgtccgcacgtacgtacataccgtttccggcggcggcgatctcttgacccatctgctcattcagcttcgtgatcaccacgtttccgtccttatccttcatataattattgcttccttggatggggatcggagaacctttcggatcacccattcccacgatgttcacgtggatgcccttctcggcggcggctttggcggcaccgatagcgtcgtcctcatggttctcgccgtcggtgatcaagatgatcgccttatcggtcgtctcgtccggggtaaaggaacgggcggccaagttgatggcggcaccgatcgccgtaccttgcgtagagaccatcgacgggttgatagaggacaagaacatcttggcggagatataatccgaggtgatcggcaactgcgtgaaagcgtcgccggcgaacacgatcaagcctaccttatcattcgtaaagccgtccgtcaatcgggatagcatctgtttggccttatccaaacggttgggcgacacgtcctcggccaacatggagttggatacgtccagacacaccatgatctctactccctgacgcttcaccgtctccagtttcgagccgaattgaggccccgctataataaagataaccatggtaatggctccgaacaacagccaaaacttcagatgctggcgcttggtcgatacctcgggcatcaactcggccaacaacgtagggttaccgtatttctttatcgctttcttcttcacgatcatggcgtacacgtagaacgccaccaacgcgggaaggagaaaaagcaaatataaaaagtccggatgcgcaaatcgaaacataagccttttatctttatggtatatttctcaacaatgtatttctcaataagatctccaccagcaacagggcgaacaccagcaaggcccagttcttatactcctcctgcttcttactgtactcttgtacgctgatcttggtcttctccatctggtcgatctcggaatagatctccttcaggctggcgttgtccgtagcacggaaatattgccctcccgtggtagaggcgatctgcttcaacgtagcctcgtcgatctccaccgggatattctggtactgcacgccgaaagcggtctggaacggatacggcgccatgcctttcgttccgactccgatcgtatagacacgcacgccgaacgtcttggcgatctcggcagcggtaaccggagcgatctcgccggcgttgttcgaaccatcggtcagaaggataatcaccttcgacttagcgtggctgtccttaatacggctcacggcattcgccaagcccaacccaattgccgttccgtcttggatcataccgctttggatatccttgaagaggttcagcaagaccgtatgatcggttgtcaacgggcattgcgtaaagctctcagcagaaaagaccacgagaccgatgttatcgttcggacggccgttgatgaacgacgcagccacatccttcgccgcctccaagcggttcggtttcaagtcttgcgccagcatactccccgagatatccatcgccaacatgatatcgataccttccgtggaagaattggaccaactattcgtggattgcggacgggccaagatcacgatcagcagcgctaccgctaccatacgcaacacgaaaggcacgtgacgcaagtacacgatccatgataccgctcccggcgcctcgaacgcctccgacgaggagacctgcaagctggcctgactcttgctcagcttgtagacataccatccgatcatcgggatgagcaacaacaataaatataaataattaggattcgcaaataccatctcttaatcctttaaattagttgtatcgttcgtagacttgggctgatagcgtgtcaagtcgtcttgacacggggctaccggctcatttgacagagggctgtcaacggctttgacagcaggctgtcgctcctcttgacccgaggctgtcagctcatctgacaggggactgtcaaccagctccaccatctcctcctccttcgtctggttcacgaacaaatacgcgttcatcatactcaaatcattctcatccggcagcgggttcatcttggcgaatttcacgaagtcggccaattgcagaatctgcctcaagttatcgtacacgctctgcgcctcggagttcttgcggatcaggtccaagatctcaccggaagtcatctccatggcattgataccgaaacgttcctcgatatacttacgcagcgtatccgtgatcaaggtgtaatactccttgcttcgtccttgctgccagagtttctgttgcttgatctcatccagttccttgatggcctgctcgtgaggcggaagtttcggctcctctttcttgaatgggatcaacgacttcttcgcacggatccgtttcacgatataggcgatcacgcaaatcaagaacagggccagcaagatcccgtaaatgatcggataataatcggcccatacgaaaggtggcttccatacggtcttgatgtcgttgaactcctccggcttgtccgcgttcacgggaatcgtggagaccttcaaggcgacttggttggaatatacggtatccaccccgtctatcaccttcaacggaggcaacagatagagtgacgagtcaaacgaggtaatcaatacatcctgcttgataacgagccggtcgttctcgatctccgtggagtccgccttggagaggttcagtacctccacccccgtcatcaaggtatcgttcgggatcacgatctgcacggggcgatccttatccgccgttaccgtaaggtgcaaggtagtctgctctccgatcaatatggcggccgagtcgatagcgacatcgatcaacggcctttgcgcatatgcccttccccccacgagggaagcggcggcgaccagaaacaggatacttttctttatcaatttcatctgcttgctttaattacgtttgtcaaaaagagcaatcaatgctttcacataatcatcctcggtacggacagatacggagtctacacggcatttcttgaacgtatcgctcatcttcgcctgccgtttctcccaccattccttataggccgcgcgcacacgggcggaggaactgtctatccattgctccttcccggtctcggcgtccttgatcttcataaggcctacggcgggaagctcggtctcacgacggtcgtacacctgaatggctaccatgtcatgcttgcggttggccaccgtcagggcgtccttgaaaccctccttatcgataaaatcggaaatgaggaaagccgtgcaacgcttcttgatggcgttggtcaagtatttcaacacttggctgatatccgttctcgtctcctcgggatggaaatcgatcagctcccggatgatatataagatatgtttctttcctttctggggcgggataaacttctcgatcttgtccgagaagaacaccacgccgatcttatcgttgttctgtatcgccgagaaagccaaggtagcggcgatctcggtgatcacctccttcttcatgacgttgacggagccaaagtcacggctaccggacacgtcgatcagcagcatcaccgtcagctcacgctcctcctcgaacaccttgacataagggcggacgtagcgggcggtcacgttccagtcgatatcccggatatcatcgccgtactgatattccctcacctcgctgaacgccataccacggcccttgaaagccgaatggtactggccggcgaagatgttacgggaaagaccacgggtctttatctcgatacggcgtaccttctttaataattcgcttgtctccatttaaggaacttctactttattcaagatctcgctaattacctcctcagaagtcaagttgttcgcctcggcctcataactcaagccgatacgatggcgcatcacgtcgtggcataccgcacggatatcctccgggatcacatagcccctgcgcttgatgaaagcgtacgcacgggcggccaacgccaagttgatagacgcacgaggggaagcgccgaaagagatcatgctcgccaagttcggcaaaccagcctcagccgggaaacgggtagcgaagacgatatccacgatgtaacgctcgatcttctcgtccaaataaacctcacgaaccacgttacgggcgtcgaggatctcctctttcgttaagatcggcttgatctccggacgttctccggatatattctggcgtatgatcagtttctcctcctccttcttcgggtaattgatgatcaccttcaacatgaaacggtctacctgcgcctcaggcaacgggtacgtaccctcctgctcgatcgggttctgggtagccattaccaagaaaggcttcggcaacttgtaggtatgctcgctgatcgtgacctgacgctcctgcatggcctccaacaaggcactctgtactttcgccggggcacggttgatctcgtccgctaacacaaaattagcgaagatcgggccttgctttacctggaactcttcgcttttctgactgtaaatcatcgtaccgatcacatcggccggaagtaagtccggggtgaactggattcggctgtatttagcgtcgatcaacgacgacaatgttttaatggcaagtgtcttagccaaacccggcacaccttccaacaggatatgtccgtccgaaagcaaaccgatcaacaaggattcaaccaaatgcttttgtccgacgattactttgtccatacccatcgtaatcatgttcacaaacgagcttttactttcaattcgctcattcaactcacgaatgtctactgtctgactcataagatttattctattatattgttattatattgtcccaattttacgttgattttttaggatgcacaaaattagaaatgttaaattcgtatccttcacttttgcagttaaataatactaaccaacacttcctcgttttgttttattttacttaaaaaagggggatttctcttactccccggcaagtatctctgtttgtagggcggcggctttctcccgcgactcacggctcttggcatcgatgccatacgattccggtgcgggtatctcgatcacggtaccgatcgggacgttgttcgggtcttttataacagccttattatgttggtaaatatacacccagaataatttattgccataatattccaaggcgatcacggtgaggcggtcgccatgcttgatcttcacctgccccaatggttttggcgccggttccacataaggctccggttccgtatgcggggtcttctccgctaccgagtccggatgaagcatccaagctgattcttgaaccgtgtccttggccgtattcttggcttccgttatcacctcttcttgggcaggcgccggtttccaattatttcttcccagatagaagaatacagagattacgattatcaaaaaggcgacgatcattaatacccccttttcctccggtttcctacgggcttgctcttccggtctctctggtatgggagatggctccgcgggcagttccggttccaatccacgttccggttcagataccgatgacggctccggatcaaacgcttgctctggctcaggcaatggttcaggttcaggttctagtatcggttcgggcttctctttgggctgagtatttgccaaagggatttccttatccggcattacctcctccacggactcgtcttccgtttccttctcctctacggactcatccatgtccgagaaatccacgttctcgttgatctctgtcgtctcaaagatagagaaaggcttgtttacctgttcccgcaggtctttatccggcaggaaagagaatttataatgttcggggatcaagaaacgttcaccggtattcacgtggatactctcccgcttctccacagagataatcttgaaagtacccaagccctttacttttacgatcttatccgtatagaccccttcggataccaccgagataaaatctctcaagaaacgctctacctctcctctgtccttgccggtacgctccgataataaaccggctaaatcttgtatattcagccggttattcatgatcacccaattcctttaaacgattcttcacggtcgttccgggcttgaacacgggaactaatttagggggaaccagatatcgcttcccgttcgccggattcacggaaatacgttccgctttctttttcacctcgaactggccgaagccttgcagatagatcgtatcgttatccactaatttcgaacttacgacggaactgagcgcagaaagcatgtcggatacctccttcgaggtccaatccatgcgattcgccaattccgttataagctccttgtttttcatatctaattccataacagttcgtgctgctatattagttattttttcgttaaccgacaaatatattgacagtttttacatcaattcaacactttaccatacagatcaaacgcttgtgcgtcaatcacctttacttggtaaaagctacccggactcaagggagtatccttggagatcaatatttccggatctacctcgggcgagtcgtattgcgtacgtcccacgtagaaatcctcctcctcccggtctacgatcacccgaaaggtctgccctactttcgaggcgttcacgtcggcggagatgccttcttgcacacgcatcaagtaatccagccggtcttgcttcacctcctgtgggatctcgtctttataatgctgataggcgtaggtaccctcctcgtggctataggcgaaagcgcccatgcgctcgaaacggatatccttcacgaagcggatcaactcctcgaaatcctgttccgtctcgccgggatgacccaccatcaaggtggtgcgtagatggatgcccggcacttcccggcgcatacgctccaacagctcataggtctcggccttcgtgatattgcggcgcatcatcttcaacatcgggtcgctgatatgctggagggcgatgtccatatacttgcaaacgttatcacgctcacgcatcaccggcaacaggtcataggggaaatgagacggatacccgtaatgcaaacgaatccactccacgcccgggatgtcggatacccgctccaccagttccggcaaggccattcgcttatagcgatcgaggccataaaacgtaagatcttgggcgatcatttggaattctttcacgccttgcgccaccaagccacgaacctcgtctacgatctcctccatcggacgggattggtaagccccggttatgatcgggatcgagcagtaagaacaagtacggttgcatccctccccgatcttcacgtaagcgtagtgcctcggggtggtgagcacacgctcggtagccagctcttgatggtacgacttgcccagatcggagatcaactccttccaattgaatttcccatagaaacgatctacctcgggaagttctttctccagatctttcaagaaacgttccgacaagcagcccatcacgaagagcttcccgatccgtcctttttgtttttgttcgcccagctcgaggatcatattgatagattcctcttgggcgtcgccgatgaaaccacaggtattcaccaccacgatctcgccattgatcttatggggatcatgctctaccgtatagccattggcaacgaattggcgcataagttgctccgagtccactaggtttttcgaacaccccagcgtaataatatctactttattttttctcattctccaaataacgaattgacaaactcacgtttgcggaatacttgcaaatcctccatcccctcgccgagtccgatatatttcacggggatacggaaatggtcggagataccgatcacgacaccccccttggcggtaccgtccaacttggtcacggccaaggcgttcacctcggtggcggcggtaaattgtttcgcttgctcgaaagcgttctgcccggtagagccgtccaataccaacaagatctcgtggggggcgtccggaatcacctttttcatcacgttcttgatcttggtaagctcgttcatcaagttgatcttgttatgcagacgtccggcagtatcgataatcaccacgtcggcatcgttcgccttggcggagctcagcgtatcgaaagccacggaagcggggtccgagcccatgttctgcttcacgataggtacgcctacccgctcgctccagatcactagttgctccacggcggcggcacggaacgtatcggcggcgcccagatagaccttcttgccggctttcttgaactggtaagccagcttaccgatcgtggtcgtcttacccaccccgttcacgcctacaaccatgatcacgtagggtttcttgccctccggaagcgcgaatccctcggcatcctccgtattgttctctgtcagcaagctagcgatctcgtcacgcagcagggtggtcaattcttgggtggtgacatacttgtcacgggccacacgcttctcgatacggtcgatgattttcaacgtggtatctacaccgacatccgaggtaatcagtacttcctccaaattatccaacacatcgtcgtccaccttactcttaccggcgatcgccttggtaatcttggaaaaaacactctccttcgtcttcgacagacctttatccaaggtttccttcttgtccttactgaaaaagctaaaaatacccatatttattttgtttctgtttttatttacttcaaatcacacttatcaagtagtttccggatctccttaacggacatagactcaatctcgctcttatcatacatcgtcacaagataaattgttccttcatcaacgctgacaagtaccgtaaaagttatcacccgagctccccctctcttaccctgtgatttcgaacggatggacatccggaccttagcgaagggcggtaatgcctcaatcttataactcattcaatagatcctccaatgggcgagaggttatttttcccgccttcaagtcttttacgctctggaaagcctcttccagcacctcccgctcgcttcgcttggcaggcgagaaggtcttctcttttaagttccgcaagagcgataaagccttacgcataagctcctcattatccaagatactcatggcttcctccatgtatgtatatttcaactcattcgctgtcatggtcatattcctccctttgcttgtttttaatccatcctgttcttataatcctcatagccgaacgtacggtacatcaccagctggtcgtccttgctccaaagggctaaggaaggatgcgggatgccgttgaacatattcgttttcacgatcgtgtagtggatcatatcctcgaaaatcagcttgtcgccgatctccaaaggcttgtcgaacgaccaatcccccatataatcaccgcttaaacagctattccccccgatccggtacgtaggtttcccctccacggcatccgtggcgaaacggatagccggcttgtagggcatctccaggcaatccggcatatggcaggtgaacgaggcgtcgataatcgccgtcttgataccgtggttctccacgatgtccaccacggttgtcagcaagaacccggtctgccaagcgaaggcgctacccggctccatgatcaactccaagttcggatatctttccttaaagcctttcagcaaagcgattaaatgctccacgtcgtagcccttacgggtcatcagatggccgcctcccatattcagccacttgacgtgaggcaggaaacggccgaaacgcctctccacctcggccagtgtccgctccagatcataggaggtagactcacacaaggtatggaaatgcagcccctcgataccctccggcagcttatctcccagcaagtcgccggtcacccccatccgggaacccggggcgcaaggattatacaggtccgtctccacgtccgagtattccggattgatccgcaatccacaagacacccggttaccatccgcccgcaccatcggataaaaacgatggaactgagagagcgagttgaacgtgacatgactactgtatctcaagatcaacgggaaatcagcctccgtataagccggggaataggtatgcgccggacttcccatctcctcgaaggccaactgggcctcgaatttagagctcgctgtcgaaaaaggaatgtactcacgtacgatcgggaacgctttccataaagcgaaagccttaaaagccaatatgatattcactcccgcacgttcttttacgctcttgatcaaggacaggttgtttctcagtaatttctcctccatcacatagcaaggcgagggtatcttgttgatgtctatcatgctgtatctcaatatttcataataaatgtgcaaatatagcgaaaacattcggagaaagcaaggtttccgctccgaaaaagcaataaaaatacaactatatttttcatttaaagactattgtgtttagccacgaacactattgtgtttggcggcgaacattattgtattcaaccgtgaacactattgtgtgttttaaaggaaaaaaacggcgacgtgacgtcgcctcttctttttttcttatctttcctaatatacttatatatagtagtgcgaaacgcagtgcgaaaaagcgatacctttttcattcaatcaactaaaaaccaacaccttggtcattcgaaacgtagtgcgaaatgcggtgcgaaatacgatgcggctcgtagcatgcccagacatgccataagctaaccgtcaatcattcaacatagtaagtttagcgaacttcaaaagtaactgcttttgtccgaaatgatcgaaggccactgtagccttcgcgttaccaccctctccttctatcgagacaatctcaccttccccaaaacgatcatggcgaaccttggaacccacatgtaaccccgatagatccgtggctggagccgccgaaaaggacgattccatcgtgttttttagcttcgtaagatgcccttgacgctgtgccgcttgcttcaccggcgacacgaaatcatcctcaaccgcccttggttgccggaatggagaggcaaaagccgggcgcccgtagcgttcacgggccgaggcgaatgcatctgaagcgccggcatccgaaggcatatccagatacttagcgtctatatccttcaagaaacggctgggcgtacacatatccgtcttcccattacgatagcggctcttcgcatagctcaatacgcaattttgctccgcacgggtaatcgccacgtagaacaaacgacgctcctcctctaccgctctcgggttatctttcgacagggacgaggggaataggtcttcctccaagcctaccacgaaaacattcgtgaattccaatcccttggcggcatgtacggtcatcatcgtgaccttatcggagttttcctctttatcgttatcttgatcggtgagcaaggatacctccgccaagaagtcggacatggcgacttgctccatgccctcctcacgccggatctcgcaaaactcagcgatacctttcagcaactcctgcaagttctcttgcttgctcacgccctctacggaacggtcttgaaacaggtcggaaacgatgccgctacgcttcaccaccaaggtagccaattcctctgcggagagttttttattctcttcaatgaaaacttcaatcaaactacggaaatcgctcagtttcttagctgtaccattatttatcggtagcgaatattccaagggggcttgaagcacggtccatagacttaccccgtattcagtagcggcgccaacaagcttacctaccgtcgtatccccgattccccgggtgggataattgatgattcgcttcaaggcctcctcgtcgtgcgggttcacgatcatgcggaagtaagagatcacgtccttgatctctttccgctggtaaaaagacaaaccgccgtaaatcttgtaagggatgccccgctttcgcaacgcctcttccaagatacgggactgggcgttggtacgatacaagatagcgaaatcagcatacgagaatttccctaatatcccgtgcatctcgttgattcgggctgctacggtgtagccctcctcataatcggagtacgaggtgaaaacactcaccttgttgcccgcctccttctcggaatagaccgttttgggtatctgacgtgtattcttgtcgatcaagctattggcagcgttcacgatattctgggtggaacggtaattccgttccagcttgaagatacggcaaccggtataaagattcttgaattgcaggatattatctatattagcgcctcggaaggaatagatgctctgggcgtcatcccctaccacgcagatatggccgtgtctctcgcaaagccgttgcacgatcaagtgttgggcgaagttcgtatcttgatactcatccaccaatacataccggaagaagttccggtatttctccaagacggccggatgatcccggaacaggatattggtttgcagcaacaagtcgtcgaaatccatcgctcccgcttgcaggcaacggctctggtaacgtttgtagatttcccgaagcaaggggaccttggcattcatatcgctttccacgagctctttattttgctcgtaggccgtataagttatcaaggagttcttcgcgttggagatccggctctgcaccattcctaggcggtacaccttatcgtccaattgcatttccttgatgatggatttcagtaagctcttggaatcagtggcgtcataaatcgtgaaattggaaggataaccgatatgctccgcctcgttccgtaaaatacgggagaagatggaatggaacgttcccatccatagccgacgggccgtttggtcaccggtgatggccgcaatacgctctttcatctcccgggccgccttattggtaaaggtcagcgccaagatactatagggaggcaatcccaattgcaataaataagcgatcttataggtcagtacccttgtcttaccggagccagccccggccacgaccaaggatggcccctcattgtaaaccaccgcttcccgctggctctcattcagttgattcaaatactcttccacattcatccgttttagggatacaaaattagggaaaataagcgattccacataaaaaagttgggcaggtcgccgataatatatacatttgcctacatataatcagtagtattaaccaaaacaagagactatggggaaatgggaaattttgagaaaataattattaagaaagagcgggacaagatcaggagggagactttagggaagttcttttttgatttggctaagttggttttcgccgctatagtattgggagaaatactccttttgcaagagaatgtttttgataagagttgttgggtcatgataatgacaggtcttagtgtcacctattcattagcttggttaggaaataaaattttaaaataaaagaatatgatattaaatccattaagtgccctattcttagtagtaggagttattacaggtttatttatcgcttggctttacacgaagcccggcaagaaatggctggacgagttatgataccgtagggagcgggcctgtgcccgccctacttatctagggcgtccaacagatcatcattccttatgcttctccccgccttcttcacgctcgcttttaaatcaccgatccggtagctaatggcgatgccgaaaccacgactaaacatacgctcggtctgccggatatgaaagtccggatatcgctcgttaatctgtatcgtcttatgatctcccagaaaatcttgcgcccgcagcgtacaagtcaatttatccttcaagaagctctttaccacactcaagccgtaaaaataaaagccgtacgagtccatccccacattcggctcggaacgcacgtacccacccgacaggacaaaacgccacccgtacttaaacttctgcgagaaatcgacaaaagcagagccacaaaagccggaattacgcacatccgtatcgtaaacctcattcccctcctgcgcccgtaaatccagataatgcaacatgctgttcagcgacacgcttgtccggggcgaaggattatagcttagataaaggtttcctcccgctgctttcacgtccacgagattatcatacgtactattcaccacattcgccgaatcaatgaacagatactcatcaatcaccccttttcccaaggtgcagagcacggaagcttgcacattcaatttcgttccgtaataactgtatgacgccgaaagacgatgatgtttctccgataccaatcccggatttccatacgagatagaggtcccagacacgaacaccgtaggattcaaatagctgatattcgggcgacgtaaacgtaagttgtaagccaagcgaaacaaactccggtcatccaagcggaaagcggaggtccaagaaggaacccaatccgttacacgataattaaaatccttgccttcgccttgtttataagtcacgtcctgccaagtatgttccatacgaatgccggggttcaagctccatttaccatacttaaatccatatcccgcataggcggagcatatattctgcacatgccgatattccaccaaaggctgtaaatctgcgggtaaccagacaccctcatccaactcctttacctccgaagtagcgtggctcgtactgctacgccgaatcagcttcaaaccgccctcgatggaatgcgtacttgtaaaaggattcacgtaatcaagctgggccgtatgctcatgggtgcgggcatgactgatttgccgggtataatcggcctccagttggggtaacgagacattacccatcttatccttatcgtaaaacacgctatagatatcgttcgggatataatcatactgataggaaagcgttagcatctcttccttatttcgtttgaataaacgctgataatccgcttttaaggaggcgctaccccattcgttctttttactcatatcctcgttataagcatagatttcttccccctctttatcaagcctgctataatggctattccaaatagagttgctgtttccgatattcaagtttccggacaaggagattaaattcaatgtatcgatctcgaaactgccttccagacttccataatgagccggatatttcacgtctacgtccgagagcatccggagcttcgcaccgtcttccgactgagtacggagataatctgactcgctctcggatgactgttggctaaacgtataatttccggaaagcgataatcggccatatttcagcgtagcgaaaccaccgacactcttaaataagttcatcaccgtagtgtttatactcgcgttatatccctcgaactccgctcctttcgtcacgatattcaagattccgctgacaccctccgcatcgtaacgggcaccgggatctgttatcacctccactttcttgatcatgctggcggggatactacgcaagacctccttgggattattggagaacatattcgagggacgcccattcatataaatcttaaaactggattgtccgtttaccttcacgttatcctcgccatccacggtcactagagggactttccgcaacatctccagcagggtataggttctggaatccgggtcctcggcgatactgtaagtagtcttatccgcctccgcctttatcaagggtttcacggcgacaatgtttatctcgggtaagtcctcgttcaaatacaatgaatcgggagagacgagttgggcggtcaacgtcgagttccagtttcccacaagccctatcaaggtcatcatcatcagaaatcttttcatatctgcatcttatttgatttgttttcgggcaaaagtagaggcaacagacaacaacaacataaataatcgccggataagtagctgacatttccatgacatttccatgacatccggtcatttagctggatttatgtctatttcatcccgaatcctatcgaaaaggatactttccttctataatatttagtaccttcgaacgttctttttatgttaattctaatctagcgaataatgaatacacgactatcggccaatctatctgttttgggtacctccttaatgctgattctctcgttcagcttcggtttccatagttatacggaagctaagaaaacgatcgtgacagacttgaaccaagcgttgcaacaaacgatcctgcaaaattcccaccaatggatgagccaagattccatacgcacctatgccaatctatccaagcatttcggcaatccggtatccatagaaagttataacaaggacttttccgacgcattgagttatacgcccgacaagaagaaaacgggaatcgtgatccacgtactcaataaagatcctcaaaccgaaaacgctcccgctaatgccaacaagaaactcaacgaatattatatcgccagcgatacgattatctgggcatcatccatagcgaacagccccaatgctaccacggatcatatcgggatctcattccaagggtacgccaattgctccacctttgcggttatcgggctatcggacaaatctttgcccggcctattcctcgggcttgcctttttatccgctaccctgcccttattgcttaaacgttatagaaaggagttgataatgcctcagcctatccatccgggaaagaccatctctttcggtaatttgaacctttcttgcgagaccgcctccttctataaggagaatgaggagaaactaaaactcacccctcagcaatatgccttgatggagatgtttttcctatcgcctacgcatatcttgaaccgctcggatatctgcgaaagtttatggccgggaaagatcaacgccgacgagaccttgaacaccttgatccgaaggctacggcctttagtggaggaaaacagtaacctaaagatcacgacagaccgtggacgagcctatgtgcttgaaataaaaaagagcgaccatctctgatcgctctttcctttttatctagatagaattaatatcttccaccgtcccggttagaaccataaccgccacctctgttagagccatagccaccgcctctgttggaaccgtagccgccacctctgttgttattgaaacgaccacctctgtcgcctctatcctctctaggtctggcttctgttatattgatgactttgccgtcataacttgcttggtttaactcctcgatagcctttttagctagctcatcatcgctcagctcaacgaaaccgaagcctcttgaacggccagtttctctatccataataacttttgctgaagtaatctcaccgtaatcagcaaataacagtcttaagtcctcatcagagatgttgtaacttagatttgaaatgtaaagattcattttgtaaactttaattaaatggttaattgagctgagtatgtcgactaaaaaagtttacctaacaaatcaagttgtgagcaaatactttctaatactaacttaaatcaatctcaaatatgctgcgaatgtaatggttttattcgagcatacaactataaatccaataaatttcgaaaaaatataagggcggggtctgcccgccccccacgaaattagaatacggtaacttcttgtcccgcggtattcgcacggattaaataatcgtacatcgcctcgcaatacaccggaggcaggtagaaacggcccgggtagactgcgcaaagattaatcttcacggtcacttgactgcctgccggcagacggtctatataactataaacacggtcgtcacgaatatcctgataattcactccggcgctcaagctgtccgtaacggactcattcaagaaacgggtattcagtatttcccatccggcagggaagatctccgataataccaaattattatatccccgggccgaagggttctttaccgtaaccacggcggagaaattcgtaccttgctccaattgggcgacattgaccggacttccgttcaagtccacatagctaaccgccaatgagacaccgttcgcatacgctttttcctctccctgctccggtattccctcggttatgatacgggcgaagagcgtagatttacccgtgttcttcaactcgacgctcgccgaggtccccgccttatccaataaggtctcggaccatatattcttatctgttttcacctgtccatcctttccgccacaagcgtacgtgaaatccatgaccccgtctacccgatatttagctaggtagtccgacaaggcaactaaagcgaatgccgtagattgtgtgctcaaccaatcatccgaagaaagctgtttggacaattcttccaccaaagtagcggcctccttgcctttatccaacaagcaaagcgtcattaactggatggattgatcccggacatcactgccgaacgtctcgtcatactcggaataaccggaaggaagagccgtcgtcttactgatcaagtcttgagcgacatcctcacggccgaccaaggcataggcggaagctagcgaccagcgactcatggaggtcaagtctttcatctctttcaagcggttcatggcacccatctccggcgacccggccaaagccaatacatacaggcgataggcttgggtagtctcttccgaatccatataataagaggtagccggcttccaattacgggctacccggcgtagattattcaatacgctttgtttcatggcctcgggaaccaagtagcctttcttcgaggcttccagcaagaaatgagtagcgtaaaccgtaccccagccattgctgctcgttccacccggccaataggcgaaagccccatctacggtctggtaagagcgtagacggcggatcacctctttcacggcctcctccgtggatttcgcctgttgaggggtcaaatccgtaaacgaggagatataaagctgcgggaatcctttcgaggtgatctgttccagacatccgtgaggataacccaacaaataagatagacgtgaggataagttcacgggggcgatatccgacacttccaaagtcaactggttcgtacccgtggcacccggcatcgcaaccgtctctttccaagacttgccggcctccaaggtagcggcggtaactttcacttgcgggcggcgtaccgtacggatctccagctccgtctcataaacagatttatcccctttacctgtagcggttatcgttaccttcccgatacccgggttcttcttcacccggatacggaacgaggcttgctgatcccctttccgctcgaagctcaagctcctcgtcgcctcgccgaccacttccatattcgagctgcaagcgatagatacattcacggctcctacgccatcctcggtagcgaataccgtagcgggtactaccatctcctcgcccacgccgatcacccggggcaaggttcccagcagcattacgggcttacgtaccatcacgctcttatcggcatgtccataagcctccccgtttccggctaccaccatgatcttgacacgcccgttataattcggcatctgataggtatgccgggcggtcttccccttcttcagcaagaacgggccgtcaaatcgcaccacgggcttgaaacggttcacgatcgctttcgggcctttgttcagcgcatcgtcgccgccgatactgaacaattgctcgatacggccgccataagcgccaaccacgtagttatacaaatcccatgtattcacgcccaacgcttcccgggcgttaaacgccttccaaggctccggcgtacggaaacgggtcaagtccagcaagccctcatccacgatcgccagcgtgtaagccatctcctttccattcttctcggagacggatatggtataagaggcatccggtttcaactcggcgggagattggataaccggggtcagatggctctccggagaagttaccgtgaacgggaccacgccatacaagcggatcggcaaatcgttcttcgtaatgccatgaggctgcaataaggtgatatagacgtaagcgttcggctgcatatctttcgtcacatccagcctcacggtcgtttgtttatcctcgcacgtatgttccgtcaaggaaaggacacgcacgccgttctctatactgataatcgcacggcttcctttcgtagaggggaaggtgactaccatcttctcgccgggcgtataactatccttatcggtcttgaaactaagcatcgtggcggactcgctgccatcggtgttacgtcggccctcgttataaggccagtcgaaataactcatcactcccgtagagtgcttgctctccttatctttcacggagatgaaatacgttccccactccttatccgggaaagagagctggaacgtaccccggccgtccccatccgtacggacggcaaatgtctttaccggcttattgtaggaatccgatacgtaattggccagaccgctactgttggagtcccaccaccaatgccaatagaccttatatactttcacatctaattccgtattcgcttgcggtttccctaaataatcaacagaagcgacctcgtaggtgtaattggttccggtatttagttgttccttatctttctgcggagacttgataccggcataccggcgataaggcgagtaaagcatccgatccgcgtcgatactgaaatcgccggattcctcatagacccgggtcactaggtttgccagcaacattccgggagcggtagaacccagctcgaagcgggcttgtaccgtggcatcgccccgctcattggtaacaccggagatcagcttgctctcttccgtattaaatacacgggaaggatcgtcgaaatagaaacccttatagccctcgaaggtagtcggggtggcgataaaggtaccttgtatatcatatttcaagttacgggcgatagctccttgcagccattccacatgcaggcgggcatccataggctcacctcgcaacaaggtcttctccggcatggataaggcgatcttcaggcggtttggcttgatggactcgatgcgtaagcgcttcgagaaagagaccccacccacttgtgccttcacattccacgcacccgtgggggcatccgcctcggtaacgaaatcgaaggcgtaaagccccagctcgccacgggtctgcgtcttacgagcatacatttgccctaacgggttgtacagctccatcaccaccggatgctctgccggcaattgcttcgcccggtcgttcagcataaagcccagatgcaacgtatcacccggacgccatacgcctcgctcaccatagataaagcccttgatccctttctggacgacctcgcccgatacatcgaacgagctgagcgagagagccgatccgttatccacccgcagataggaacgttgggttccctgtgaggcgatcaggtagaacggacgtcccgaggagatatccagccgtacctgtcccttgtcatcggtcgtgcccgaggccaacgcttggtgttggtaattataggcggtaaccgtaactcctcgctccggctccgtactctgtatgttatgcaccaacacggtcatatcattatcctgccccatcaaggcgaccagtcctaaattagtagccaagacattctttccctccaccttattaaaataataactgtccgagcaaggatcatcccgtttctcccaattataatcagaccaatcatactggcgataatagtaataccctccctcgtcaaaacgggcggactcttccttgaaacggatctcatccgaggccaagatctgttccttcgagaggaccaccgtatcattcccgcaaggataaacagacaaagaacggtcaaacgaaagctccagacggtagatagcgcccggttccggctcgatcaatcgtttcaaatcgatcgcgaaggtattccaccgggataaatcaagaccctcttcatccaagaagatcgtcttacgggcgatcaagcgcccgacacgcattaactccccggactcatccaagttgttcgattgcaggaactgaccgatattctgctccaatatcttgataacgctcaccgtaacccctcgcaaataaatcgcttggaaaggaacggataattgcgtggattgcgggatgatcactcctttcccgataaaacggacgttaggtttctgctcgttggctaccacttgacgcacgacggcctcttttaggttcaagccgctcttactgcggatgccttggttcagatggatgttcatcgcacccttctcccgcaagtcggcgtccggatataggcgtagcttgttgccatccacgtttacggtctccgaggtatttccggcgataaaagccaagcctctcatatcttgggccgagtccaataatttcgtgaaagcgacctccacgtagcattccggctcagatacatataccacgtcgtatacagagaaatcattctgatccggaatgttcaccgtcactacatcggccttttccacgcctagtttattagaagagacggaaagcctaagtgtccgttccccctccatccctgcgggaacattggtcaaggttacctcatgtttcttcccatccgggctgtgttgccaagtagcgtctaccttctccgagaaatccaccaacgactccacggtccccggagattccttatccggcgtgaaaagcacggctgtcagatcgtacccattctcgtttttcttgttgatatccatcgactccagattcccccgaagagctaaagggagcgtggtaaaaccgaaagcgaaccgcttatccttaccttccgcctcaaaccattcggacaaatcgacgttcacctgataagaggtgtttcgctcaaagcctttctccggcttgaataccaacgtccggttattctcgaaagcccatcgtcccggcacatcgggcttgaggcgcacgagtttccccaatcggtccgcctttaaccgctccgccgggatctcttgattaaagatcaggtaaacgggagaataccgggaaatcttcccggtagtgaacgcctctacattcggattataaggagggagatcttgatccgcagggcttgtcgtatgacaacttgtcaagagagacaagagacaaagtacgcagaataaaccgatagaccgtatcatacacatgaatgtttaaatggttaatccacaaatgtacataaattataccaagatgcaatgatctatccgtatatctccttttcgaacaatcacttctcgaatatattcgctatatttgcgttcaatgaaacatctaagattgtaaaacaagatcatgaccaagaaactacacaaggaaatccccatcgactacgccgtctgccagcaacaagattgccctcggaccgagaagtgtctgcaccagatcgcctaccggccgctcatcgaacaaccggcaaccgtattacggctgctgaaccccaccctctgtacccgggatggggcttgcccctacttccgagactccgctcccgtcacctacgcacggggtttcaccggaatgcagagccggatgttcccggcgcaataccagcaattcatgtcgatactcatgtcccatttcggacgtaacccctacttcgagcggcgaaggggcgaatttccactctcacctaaagagcaaaggatcgtgctaaacgccttgcgaagggtcggagtgacggaagagctaaggttcgatcattatgaggagagtgtcaattggtatgattgaggcagtactccttataaagtaccgcaatactcagccggacagtaccgcagtacttcgtaaggagtaccgcagtactttgcgcacagtactacagtacttcctacggagtactggcagatgcctcagccatctatccaagtcgctattaccgaggccgggacgagtgccatggcgcctcctcgcatccctcttggggatcggcgtggcggcgtggtgtgtcatgtatggcatcgtgccccggcaattatttcccgccccctgctctaccttattatattcggccgagggcgagcttttaggcgcacgtatcgcaccggacgggcaatggcgtttcccggcggcggatagcttgcctgataaattcgtggattgcttgctcacgtatgaggataaacggttcttttaccatcccggtatagaccccgccgccatcttccgggcgatccgcttgaacgggaaagcggggcgtgtggtgagcggaggaagtaccttgaccatgcaattggcacgcatagcgagagggaaccaagaccggaccttctacgagaaaacgatcgagatgtgctgggcgctctttctagaaaccacctatagcaaacaagagatactgaacctctatgcctcgcacgctcccttcgggggaaacgtgatcgggctggagaccgccgcatggcgttatttcgggcgaagcgcctccgagctatcgtgggccgagagcgctacgctggccgtccttcccaactcccccgccttgatccaccccgggagaaaccggaaacaactgaaggagaagcgggatcgcttattggcttcccttcaaaagaaaggtatattggaagagactgaatacgagctggcctgcatggagccacttcccgaagcccctctccctttacctaatgatgccccgcatctgttggaaagactggccgcagaacaaccggggcaacgcatccaaacctccgtccgccaagccctgcaacgacagacacaggccctcgtaaaccgttatgcccgtgaatacagttccaaccatatctataatctggcggcgatcgtagcggacgtggagaccggggaggtattggcctacgccggaaacgctacctatccggccgacgagcggcgggggaaccaagtggacatcattacctcgccccgcagcacgggaagcatcctcaagcccttcctgtatgccggtatgctgcacgacgggctgttgctcccctctatgctggtatcggacgtgcccttgaatataaacggcttctccccccataattacaacaagacattctacggggcggtaccggcccatgtagccatagagcgctccttgaacgtgcccttggtacgtatgctctcccagtataataccggacgctttatgtctttactgaaatcgtggggaatgactaccttacgtttctccgaggaacattacggggcctccttgatcttgggaggggccgagggaaccttatgggatctttccggtatgtatgcctccatgtctcgtgtgcttaaacattaccgtatttacaacggacgctataatccggcggatatccatccgctgactccctttcctgcggagaggaaggaacccatccgttcccttaccgatagccggctcaccgataaggcgctcctttcctccgcggccctgtggtacacgttcgaggcgatgtccgccctgaaccgtcccgaggaagaggccgactggcaacaattcgagtcgatgaaacggatcgcgtggaagaccgggacgagttacgggggacgagacgcttgggcgatcggcacgactccccgctacgtcgtcggcgtatgggccggtaacgcttccggcgagggccgtccaggacttacgggtgtcggcaacgccgccccggtccttttcgatctcttttccctattgcccggtagcgaatggttcgacctgccctacgatgagacgcttcccctggcgatctgccggaacagcggacataaagcctcgccctactgcgagcaaacggacaccttatacatgccgctgtccggcaataacacgggggtctgcccctaccataagctcgtacatctatcggcggacggacggtacagggtcaatagttcctgcgagtctgtcgaccggatgatcagccgcccgtggttcgtgcttcctcccgcgcaggagtattactaccgcaactatcacatcgattatatcccgctccctccggtaaaacccggctgcgggcaagaccagaaccgccagatcgaactgatctatcccgagcataacgccattctctaccttccgaaaggcttctccggaaagtccgagaaatttatcttcaaggccgcccacgcccgccgtgacgctacgatttactggcatctggacgaaagctatctgggagagaccaccgataatcaccagatcagttgctccgtgagccaaggaaaacatctccttaccctcatcgacaacgaggggaaccagaagaaaatacaattcgaggtcaagtaaagcatccgttaagccttgaccttgacccaaacagccaatttgcctcccttgacaaggaaacggcctttcccttcctcatcaatcgccacggtatcttttaccgagcctgtgatctcatgccatacctcgcctttccggttctcccccacagacattgttttctctccatcttccccgttcgagataaccaacgccaagcccgaatcagcatgtcccgaatctcccaagcgtacgaagccaatcgtgttcggatgatcaaaataatccacctcttccccgtacgcatattctttccgggcacgcaatagcatatccaataccttacgatggggagatttctttccttttacgccataataatccccataaaagatacacggataccctttcttcatcaacaggatcaaaccgtaggcggaaggtttgaaccaatcctttacctgcgactccaaagaactgtttttctgggaatcatggttatccacgaaggtgacggcttgatccgggcatatctcgaccaaggtcccttttaatagatcgcgtaaatcatagtcacgacctttctcggaagcctcattcaagttataatgtaaggctacgtcaaacaaatccacgttatattctacttgcgacaggtaagcctccaacgattcggtatcgtttttccaatattccccgacagcgtagaaaccctctccccgatccgctctcaccgcctccagaaaatgcttgataaactggtcgttcatatgcttgatcgcatcaaggcgcataccgtccaagtttagttcgttcgatacccagatcccccagtcctgcatctcacgcacgacttcagggttatcgaaatccagatcggcgaacatgagatagtcgtaatttccattctcatcatcgactccctcactccaatgttttccctctcccagaatctggaatataccttccttcttgcgggacacatcatagtccgtcccggagaaatgaaaccaatgccatttaaaattagaatacatattgccacgccccgggaagtcgaagccggtccatccctctatctcatggggttcgctggtagcgttttcccgttgcccaggatctacctcttgcgccataaaccactcggtataatcggctcccgccttatggttcatcacggcatccagatatacgccaatctggttccggtgaagttcctcgatcatttcttgaagttcctgtttagttccatacttggtgcgtatggtccctttttggtcgaactcccccaaatcatatagatcataggttccatacccctcgtccgcttgctcatggcctttgtaagcgggtgggatccatacggcgctgatcccgatctcatgtaaatgcgaggcgtcatccttcagccgtttccacagcattccatcgttcggcagattccattcgaaatactgcatcattactccattttccatatgtttcttctatttgttgataaaacaacacttcccaagcgtcataagttgctgaaactaaccaccacatccttttgttatagtaaaaaactaaagaataataagatggattcaaagcatgttacagagagtacgtccggtcaagaggacattcaaaagacttggtggaaagaagcgattatatatcaaatctatccccgtagctttcaagacagcgatggcgacggaatcggtgacttaaacggtattacctcccgcttggattatatacaaagcttgggtgtggatatcatctggttaaacccgatctttctctctcccaacgatgataatggctacgacatcagcgactatcgggaaatcatgcgggaattcggtacgatggaagatttcgaccgcctcctgaaagagattcataaacgggagatgcgactggtactggacttggtagtaaaccataccagcgatgagcatccttggttcgaggaagcccgtaaatccagacataatccctattataattattaccattggtggccggccgagaaaggtgagcctcccttgcgcctcagctatttcgacgaggaaggtaacgcttggatgtataacaagccaaccgactcatattacctgcattatttctcccggaaacaacccgacttaaattgggagaacccggagatacgccaagagattttcgatatgatgcgcttctggttcgataaagggatagacggttttcgcatggattctatctctcttatcgccaaagatccctcattccctctcatagattccaagaaatatccggatatattttctttctatgccaaagagcctcgcctgcacctctatcttcacgagatgaatcggcaggtattaagcaaatacgattgtatgagtgttggagaaggttcggccgtgatggtagatgatgtcgctaaatttgtcgatccggcccgggaagagttgaatatgctttatcatttcgacgccgcccgcatccggaatacaaccctaccggacaatccggaatccggtatagactatagcttgatcgccctaaagaagatgtttacggaatgggataaggcggtagataagggttggccctcgatctacttgggtaatcatgaccagccccgtatggtcagtcgctttggtagcgataaggatgagttcagggccttgtccgccaagatgcttattacttttctgcttacgatgagaggaacgccttattggttcgccggggacgagataggtatgcgtaacattcggttcgaccatatcgaggattataacgatatcgatacgatcaaccgctataagaaagcgaaagcagagggtaaagatccgcaggcggtattggacgaacagaaagagaccggacgagacaacgcccgcactcctttccaatgggatcgctcgccggaagcgggatttacggcaggaaccccttggttaaaggtaaatccggattatacttggataaacgtagcggacgaagaaaaagatccgacctccatacttaattattttaagaaagtagtcagcttccgtaaggagaatccgagtttgatttatggcagttatcatttgctggatgcggagaatccccaatgctataccttcttacgcaagactggggccgacacttatctgattatgctcaatttctcccccaaggcggcaatctccactccggggatagatatgagtaacgcacacgtcctattggataattacggggaccgaagtcatatggcgcctcaaaaagatatcacgctccgtcctttcgaagcgattgtctttcaattgaaccatcccgtctatgaatccttcatcgattcgctagatcttttggaatgattcgttaaaaagagatacaaagcgcaaccaaaaacttttcggatgtgtttaaatacaaaacatcagaacttttaaataaaatataaaactattcgttatgggatttatttggtctattatcatcggtatcgttgccggctatctggctggtaagattatgcgtggaggaggtttcggggtcattgttaatttgatcctaggtattattggaggtgtattgggtggctgggtattcagcttactaggcatatcggccggtggtatcttaggaagcttgataacctctacggtcggagctattttgttattatggatcggctcgctattcaacaaatccaaagaggtttaagaaggcgtgctcaattatcaaatcatatattacatggcaacaagatctcacgaaactttagttacggcataatataatgtaaaaggcagtccttgccggactgcctttttatttagatcgtttccactttttctttaggtaaaacccatttcaataccagataaccgcaaagaccggatataaacgatcccgtgaatacacccagcttcgcctgattcaagagatcggcacccgccgccgtactaccgtcaaaggaaagattcgctataaacaaagcgaccgtgaaaccgattcctcccaacatggatactccaaataaattacgcttgctcatgcctgtaggcatggaggcaaatggcgtacacgcgaacaagtaagagaaagagaatatacctaatgtctttcctacaaataggcccacgaacactgccaacggaacattaactaatgtctggggttggatatccccgaatgtcacaccggcattcacgaaagcgaataaaggaagtatcacatagtttaccaaaggatgcaacttatcagcgatggtctgcaacggactgatcgttttatccgccaacgtatggatgttattcaatacctgaatttgtgtaggcgtaagcacttccgctttacgggactgacgaacctcggtatagtccagcatattcaaatacccggtcatatcacacgtgaaatcatctagcttaacaaccggacgggcaggaaccgtaaaggcgatcaacacgccggcgattgtcggatggattcctgactccagaaatagcaaccaaacgataaagccaccgatatagaaaaacaatcggttgtgtacccggaactttcctcccacatacaacaaagcgaggactatcagggatatcaacaaaggctcgaaagcgatatgcccgctataaaacagggcgataattatgatacctccaatatcatccaccacagccaaggcggtcaagaagatacgcatgctcaacggcacccgcttccccaacaagcccaatacggccaaggcgaaagcgatatccgtagccatcggaatagccgccccgtttacctcgggaggcgtattacatactaacatataaaataagaccggcacgatcattccaccacaggcggcgataataggcaatagcgccttccgcacggaactcaactcaccgatcaatacctcttgcttgatctccagaccgatcacgaaaaagaaaaccgccataagggcgtcgttcacgaaagccagcatagacatggtctcgccatgatgcgcaaagaagttaaactgcccggcttgcagatcgattggaaaagctaataactggtgatacctatctgcccaaggcgaattggccaagaccatagcaacgatggtagcggcaaacaataaaagactagcgttcggcttctgtatagcgaagcgacgcaacggtttaaggataacattaatcgtacggtccataaataataagttagatgaaggtcttcaacaattgatcgtactatgactattccctttccctcccaagagggaaacgggatatcatcttgaaataccttcaagtgttttttctattaattgacagctttggcttttcctgcttgctccaggttataagcgctgcgtgtgagtttctctacccagatgacaaagataccagttaaaattaaattaaacacaatagttaacacagaaattatcaacatagggccacctaatccatatcccaaggctatgaaaataacgccggctcctacctctccacgggtaaacataccgatagacagcgccaaacgctcccgtttcatccggtcacggtagaaaaacaaaggaaatagtttaccgatattggataagaatgagacgattacgacgtgtaaagcgatcatcgaccatgacatcatcggctgggaacctgtcaccgtagttacttccgccgcttgctgagcgaaatccacgcccataaacaccggcatgctcactccgacaaggaacataaagagataagagataaaatcggacacttgatgctcgatcttggtatcgatatgcttatgccgcatgatcatacctacgacaaacgcaggtaaaagtacctcgatatggatgctagcctcctccccgtacatatgtttcgataccagataaatcacttgcgtgataccaaacgtcacgacagcatagaacaagatggctttccagtcttgacgtacattataatatcccattttcttccaacccagaatcaagagcaataccacaaccagaataatgactcccaattgccagcgcaagccgatcatcatgatttgcaacgggatcatcaacaggatcgtatccaagtcgtcgaagatcgccaatacctgtaccttcttatacacccaagaggcttttagcccggcggcggccaacatcgtaaacaagatacccgccgaggtaggagcagcgaaccggcttagcaacaggttctccttccaagcgtcccaacttccccataaatcgcccggaagcaagacaaacatataatataaagccacgaatatccacggaaacgcagccgtagccatcgctatgaaataatcttcggtataagacttccaccgggtcttatcaatctcgaactcacgccccacattaatcatgataaacgcaaggcaaataaacaaaaacgtattagagatcgtctttaccagcgaatactgttcccccaccatagcgggaagcatttgcgacacgaccaaacccaacactagaaaaaaagagaataaaagaacttttttcattcagataaaactatattaatatttacacaataaaatgcaggggcagggttcctcatgagccttgtctctacaaaaaacaattgaaaattgaattagttgatcgcttgctactcttttagataagcggtctcaacctttaacaagcgattcttgaggcgttcggcctcccctttacggatacgaagcgtcatctcgcaatccatctcgaacttctgtgagatgatagcggggttatcctcttttacgatacgcatgatcccgttcaggtatgggtattcgaaaacgaccgtgatgtcctcgtctaccgtacgttcctcgatctctgcagcggcgatagcctcggcggcggccgtgcgataagcgacgatcagcccgctggttcctaactcgattccaccaaagtaacgtactacgacaatcaataaatcggtcagctcattcgagttgatctgtccgaggatcggtttcccggccgtggaagaaggctccccgtcatcgttggcccggaacgtctgccgctctggacctaacatatacgcccagcatacatggcgggcatcataatattgtttacggtatttctccagttgctccttcacctcttctaccgtacgcacggggatagcatacgagataaagcggctgcgcttctcggtataatatccctcggctacttgcttgatggtcttgtaactgtcgtctgccataaatcaatccggtattttagtgttagacacttcctcccggtacgcccggaaatctttcatgatctcttcgatctcctcgatgaaataaggatctttcaccttattcctcacctcctcataataggtctctatggcagccaacgcacatacgtcctgccctctcagcacgaagtaaggttcctccttctccacgcactgcttgatcatttgtataggattcttcattttttcttatttgctatatctaactcttctttcaagaacggagccgtaaacccgacgccactctttgctaaagcttccggagttccggtaaaaaggacattgcctccacggcgaccgccctcgggacccatatcgatcaagtaatcggcgcttttgataacatcgaggttatgttcgataacgatgatcgtgttgcctttatccaccaacttgttcaatacccccagcaagacccggatatcctcgaagtgcagaccggtggtaggttcatccaatacataaagcgtctttcccgtatcccgcttcgccagctcggtagccagcttgacacgttggctctcgccaccggataaggtagtagagggttgccccaacttgatatatcccagacctacatcttgcagggccttgatcttggataagatagtcgggatattctcgaagaactccactgccatattaatcgtcatatccaagatatccgcaattgatttcccacgaaaacgaacctctagggtttcccggttatatcgcttgccgtgacaatcctcgcaaggcaccagcacgtccggtaggaaattcatctcgatcgtcttatagccatttcccttacaggtctcgcaccgtccgcccgatacgttaaaagagaaacgtccaggtttataccctctcaccttcgattccggaagttccacgaacagattccggatatccgagaatacccccgtataggtagccgggttgctccggggggaacgaccgatcggagattgatccacattcacgatcttatcgacatgctcgattccctcgatggcgtcgtatgccaaggggtcttccagcgagtgatagaaatgctggctcaagatcggttgcagcgtgcgatttatcaaggtagactttccgctacccgacacacccgtgacgcaaataagagtacccaaggggaaagacacgtccacatgcttcaggttattgccgctggctcccttgatcgtaataaactgcccattgcctttccgacgctcggcaggaacggctatctccgtgtttccattcagataggaagaggtcaaggtatctacacgcagcatctccttgggcgttccctcaaaaacgacctcaccccccagacggcccgctttaggccccatatccaccacgtaatcggcactcagcatcatatccttatcatgctccacgacgatcacggagtttcccgtatcacgcaattgcttcaaggagttaatcagacggacgttgtcccgctggtgcaaaccgatactcggctcatccaatatataaagtacattcaccaattggcttccgatctgggtagccaaacggatacgctggctctcgccaccggacaaggtagcggaaccccggttcatggaaagataatccaatcccacatccagcaagaagcgcaggcgggagcgtatctccttcaatatctccgtagcgatccgaagctgtttcgggtccagcttctcctcgataccctccagccactcgtataattccgagatatccatggccgacaactcggcgatattctttcccgctatccggtagctcaacgcctccttattcaaccgccagccgttacattccggacaagtggccatcttgatgaattgtcccgcccatttctgcgccgaggcggatgcctcgctctcctgttgcatcaagatatacttggcgactccctcatacgacaagaaatagttagacgatcctaacgagtcattcttgatctgcaaccgctcgtccgtaccgttcatgatctcgtccatcgcctcctcgggaatatctcgtataggcgtcttgatcgtcacgccatgcttttggcaaagcgcctcgatctgccagaatatcaacgaattcttatatttacccaaagcgacgatgccaccgctatatatacttaaggatggatcgggaacgatcttgtccatatccaacaaattgacctgtcctaagcctttacatttcggacacgctccttgaggggagttgaacgagaaattatgcggagccggctcactgtaagacaatccggtcaccgggtccatcaagcgacgactataatggcgaacctcgttagtctcggcatccagtatcagcacaaggccatcgccttgcttcatggcgatctttaagctctctttcaaacgacgctcgtctgcctcggagacaatcatcttatcgatcactacctcgatgctgtgcatcttataacgatccagcttcatcccatggaagatctctttcaactcgccatcgacacggacgttcagatatccttttttacgtatctgctcgaaaagttccttatagtgccccttacgattacggaccaacggagccaagagatacgtttttttcccgttgtactcatccaagatcagccgtaagacttgatcctcggtatatttcaccatcttctccccgctcaaataggaataggcctctcccgccctagcgtaaagcaaacggaaaaagtcatagatctcggtagtcgtaccgacggtggaacgaggattcttattggttgtcttttgctcaatggagataaccggactcaggcccgttatcttatccacatcgggtctctccatattccctaagaaattccgggcgtaagccgagaatgtctccacataccgcctttgtccctcggcgaaaatcgtatcgaacgccaatgaggacttgccgctaccactcatgccggtaatcaccgtcaacttattcctcggaatctctacatctatattcttcagattatgaacacgtgcgccaagtatggatatgcgcccgccttccaatgcctgcttatcttttatcatcttttacctatctggttttaggggccgtaaagatacgaaaaaaacagaagccaatcaaactttccggcaaatcatagtgtaatctccgccacttcctccagcctgtttgttccctacgggaagacctcgcagtatccaccgtaaggaaccagggtttctatttatccttcacctctggctggggagaaggagcctgtatgttctcataaaacctctttttctcctcgttacttttttggacaaggcttgtcacatataccgtaaatattggaaacatcatcatgcccaaagcagccaatacgactgagaggactcgtcccgtaaccgtaatagcggatatgttagagccaaccgttgtcacatccataaacgcccaccatagagcgtccccataattagccaccaacgggttcaccttgtgctccaagacaaaaaatataagacttgagaaataaaccgtggccagcaacatcgtcaagtaagagacaaacaagcccgacgccttattgtacgacaaccatcccaccacgatcgccaacgcatacccaccccgtaccaaaggaacgaaacgtaagaaataactaagctcgggtgaggtgataatatgataatattctattatattttggtaagggatcgctacgagcaagaaaataaagtgcgttcgcaaataacgtaatttatctttcgacaggaaaaattccaaaacaaaatcgaaaagaaaaaacaaacagatccataattgaatcttcttataagaagtttgcgtgtaaaagggaatattcttaaatgtatcgatggagatactgataaccaagaacagcgacaacaatagtataatgatatgtaacacaccatatactcccttctttctcaatgcgaaatcaaatacggccattttcataagcgttactatttatttaattataatccttttcattttggtttatgacaacaaacctcatataccatttgtttaaacagcgaaatgtgttaattaaccaagttttacgtagcaaaaacaaaacatcttctttgattcgctgttataaactcagacttaaacgagagaagtaattctcatttttaaaacataaatctatggcaaatatcaacaagacagtaaagctaggtgtgtttaccctagcaatcatgaacgtgacggcagtagtatctttacgcggactgccagcagaagccgtatacggactaagttcggctttctattacttattcgcggcaatcgtattcttaatcccgacctctttggtggcagcggaattagcggcaatgttccaagacaaacaaggtggtgtattccgttgggtaggtgaggcctatggaaaacgtctaggctttctggctatctgggttcaatggattgaaagtacgatctggtatccgacagtattaacttttggagccgtatccatcgccttcatcggtatggatcatcccgaagatatgctgctggcgaataacaaatactacacattagcgatcgtgttaattatttattggctggctacatttatctcactaaagggattgagttgggttggaaaagtagcgaaaatcggaggtatggtaggtactatcataccagcggcgttactcatcattttaggtatcgtatacctagcgactggcgggcattccaatatggatttccacagtaacttcttccccgacttcagtaaattcgacaacttagtcttagccgcaagtatcttccttttttacgcaggtatggaaatgggcggtattcacgtgaaagacgttgacaatccttctaaaaactatccgaaagctgtatttatcggtgccttgatcaccgttgtaatcttcgtactaggaacttttgcgttgggtattattatcccagagaaagacatcaatcttacgcaaagtttattagtgggattcgacaattacttcaagtacattcatgcctcatggttatccccaattatcgctatcgctttggcatttggcgtattagcaggagtattgacatgggtcgctggtccttccaaaggtatattcgcagttggtaaagcaggttatctgcccccgttcttccagaagaccaataagatcggcgtacagaaaaacatcctttatatccaaggagcggctgttacacttcttagcttattattcgtggtaatgccatccgtacaaagcttttatcagatcttatcacagcttacggtgatcttatatttaataatgtatatgttgatgttctccggagcgatcgcattacgttataagatgaaaaaggcaggtcgtcctttccgtatcggaaaaggtggcaatggcttgatgtggttaatcggaggtttaggattctgtggttccttattagcgttcgtattaagtttcattcctcctagccagatttctacaggaaataatacggtttggttcgccgttctcttcatcggtgtaattgttgtcgttgcggcaccgtttattatctatgcgtctaagaaagcatcttgggtagatccgaacactgaattcgaaccgttccattgggaagtaaaaaatgacgtatccgagacgaatacgacaaaagcataacacacattcatctcgataattacctagtccgggctgcgaaaatattgcagctcggactttttcgtaaaaatagcacagaatatttacgttttattatgtgtattataaaaatgtaattatctttgcgatagtattcataaaataaaatatcaaaagaactatggcacgtacagtagattattcaaaaaaggcagagaaaatcaaagagcaagtagatgaattagtacaagaattaatggctgctaaatcggctccggtagtttccaaaagaagtttaaaagtagctgacatcaatttcgagaacgaggatgttaatacattaatgcaaatacaagctcgcctcgctcgcgttatcttggagaagagcaaataagaaaaaactctgctaaggttttaataaaagtgcctttcccgtctttaaggatgtttcggaaaaggcactttattttttaggtctcgtgcgaactttcaaagaaaaagcttatctttgaaaacctaatcaataacatgtatggaactaacactcccaacgaaagttaatgtgacacatcccatcatgctagacacgaagatattagtcgtgatcggagcgaacggtgcgggaaaaagctcttttggcagagatttattggagagatatgcgggtcaagcgaaaagaatatccggtatacatgccttattcatcagcgatgacgaatctaaattatcggcctccaatgaattcgcacgtttacagtctatgatcaaagaacgactgttcatgccacgtatttctgaatacgagaaactgattttgcaactccagagcgaggagttcgaggcggcagtcaatttcaaggaagcctgcaagactaataacgaagtagatcctccgatcaccaagatagatattatacaagcgatctgggaaaagatgtttccgcataatcgtctgatacgaaagtcgggatttatcgagcttgtatccacggggcgtgattcaaattcctacactgccggacgcatgagcgatagcgagaaactggtgttctacttgattggggccgcattatgcgcatgcccgaacgccttgctcgtgatcgaagagccggaaacccttctccacaactccataaagaaccagctttgggacgagattgaggcgatacgtccggactgtacgtttgtttatctcacacatgacattgatttcgccacctcccgctccgacagcaaacggatctggattcgttcttacgacgcggatcattccgtatgggattacgagttgatcgagagtaatgaaagtttcccggaagaagtatatatggaaatacttggcagccggaaaccgatcttgtttatcgaagggaccgacacgaacagtatcgacagcaagctttaccccttcatattccccgattatttggtgaaaccgatgggtggttgccaaaaagtaatcgagacaaccaaagcgttcggccaactgaaagacttccatacattagatagcaaaggtatcgtagatcgtgataggcgtacacaaggagaaataaactatctacgggaacaacatatttatgtaccggacgtagcggaagtggagaacctattgatgatagaggatgtgatcaagacggtcgccaaacggttgatgaaagatccggacgatgttttcaagcaagtgaaagaaaacgtagtacgtcttttccaaaaagaactggactcgcaagtaatccttcatgccaaacatcaagtccgtaaaaaactggagactaccgttgatcgcaagataacgacggtggagcaattaaccgaacatgtagagagtatccgtctgaacatccatgtggaagaaatatacaaaaacataaaagaagagttcgagtcttatatagaaacggagaactacaaaagcatcctccgtgtttataatcaaaaagggatattaccacagagccgcctatgcgcgatctgcggtatcagtaacaaagagagttatttaaacctgattctctccatattaaaggaaaacaaggaggatgcggaagcgatacgaaaggctatcaaacattcattgggcacataaaaagtttctaaaaatgcggggaaagtccataaaaaattgttcttttgcaaactgttttataacattaatgggccaaagccctatatattaattgtcatatgcgtacacctacacttcaatatctttacttgcaaaagccggtaaccatgatggtagtaatctgtattatatctgtgttaccttggatcggcctcggcgacttctccaccaaaggggaaccccgggaagcggccgtagcgatctccatgctcgagacgggcaattgggtcttgccacaatcctacgccaacgagttcgcttttaagccaccgatggcgcattggttaatggctgctttctcctatccacagggatatgtttccgagttcacctcccgcttgccatccgctttagcctttattaccttgatcgggttcgtattggtctttttcggtaaacgaatcgtaaagtttcaggaggcattcatagcaaccctcctattggtcacctgcgtagagatacatcgggcggccatgacgacccgggtggatatgttgctcactactttcatcgtcatagggcttttccagctatatcgatgggaagataaattagagctgaaaggacttcccatattcatacctttattattaggatgcgccgttctgaccaaaggaccggtaggcgtagtattgcccctattcgtattcggcatttatctattaatgttaggtcaatacagttatctcaccatattcaagactttattatatgcgggaatttcctctttattcctaccgatgttgtggtataccgccgcatggaagcaggggggagatgagttccttaatgtcgtattagcggagaatttcgctcgtttcttacacctaaacactcctgaaatttcctatgatctggggcatgagaatggtgtttggtacaatttcatgacgttggcggcaggctttataccttggactattttctttttcttctctttattcgggctgaaacttagcaagcctgagcaacctattaaagagatcttaaagaatacgtggaaacgtatccgctccatggaaaaagttcgtttatttagtttggttgctttaatcggcatccttttcttctattcgatcccttccagtaaacgaagcgtatatttaatgccggcttatccgttcattgccttgttcttggctcagtatgccttatatattacagaataccgtacgaaagtaactcgggtattcgctgcctttttagcttccgtagtaagtgtcgtcatgatagcgatcttgcttacggtattcggtattattgatcctgttggtatcgtcggtcaatatacacaaaacgcatcgaccttggacatggtacgaatggtatcaaaagtattggttcatcccagcacgcttacgatctgtattatcttcataaatctattgatattaggaacggtctattaccagatgttcaagaaaataaatatcaagattctctacgctacgatagccttaacattctcgattaatttattaatcgacggtgtcattatgagaggtattcgtgaaggggattcttgccgcattttcgctgaacgtatcctgaaagaatatccattgaataaaaagaatgtatatgtcgtaaataaccttcggatttatcggaatctgtacgggttaaacttctatatgggaaatatcttccatgacttcgataaagaaacacccgccaaaggttatttcctgatcggagaaaatgagatggaaaaggtactttccacatacgggaataaatataccttccgtacactgactaagtccgatcaaacgttcagcgagctaaaacaaaaaattgtacttagcgagttcgagttgaaatagaaatgtaacatctaataatataccatgaatagttcctatatttcccctttcgctaagccggtctacatcatgttgaaaccggttggttctgtttgtaatttggcatgcgagtattgttattaccttgagaaaagtaagttctatccagacgtgaagaatcacatcatgacagatcagatactcgagaagttcatcaaggaatacatggaatgccaaaccatgcaagaagtcttgtttacatggcatggaggcgagacgctgatgcggccgatcagcttctataaaaaagccttggagttgcagcgtaagtatgcgggaggacggcaaatagataactgtatccaaaccaatggtaccctattgaatgatgagtggtgccaatttttcaaggaaaataatttcttggtgggtgtatctatcgatggcccgcaagagttccacgacgaataccgtaggaaccggcagggactcccctctttctataaggtgatgaagggaatcgagttgctgaaaaaacatggggtagagtataacgccatggccgtcgtgaatgattataacgtggattatccgctggaattctataatttcttcaaggaactggattgccgtttcatccaattcgccccgatcgtggagcgtatcggccggcacaaggaaggcaccaagctatcttctcccgaggagcaagacgcagcgatcgagctagctccgttctcggtagatagcgagaaatggggagatttcctttgcgccttgttcgacgagtggctaaaagaggatgtcggcaagttctacatccaattattcgattccaccttggcgaactgggtaggcgaacaacccggggtctgctccttggcccgccattgcggtcacgccggggtaatggagttcaatggcgacgtatatgcttgcgaccatttcgtattcccggaatacaaactcgggaatatccaaacaaagacattaacggagatgatgtacagtccggtacaacaaaagtttggaacggataaagaagataagctccctacgcaatgcaaggaatgcgaatatcttttcgcttgccatggagagtgcccgaaaaaccggtttctccatacgccgaatggagagccgggactaaattatctatgtaagggatacaagaaattcttcaagcatgtagctccttacatggactttatgaaaaaagaattattgaatcaacgtccacccgcaaacgtgatggattgggctaaacaacaacaacatgaatattaacagacgtgatttcattaaaacaggaggtatggttatgcttggaacattagcggctccttccttactaggaagttgcaccggtagtgagggggataaagcagccggtatttcattcgctatgaattatttcaaggtgagtgagggggatttgaggaaggtattggcggcagccttggagaaaggcggggattatgccgatttgttttttgagcattcatacaggaacaacgtagggttgcaggatggtgccgtaaaccgtgcctcatctaacatcgattttgggatgggcgtacgtgttttgtccggcgaccaaacgggatatgcctacgtggagaacgtcagcttggacgagatgctaaaggcggctcgtacggccgcacggatcgccaccggatcagcgaataccgctcctatcaacttaacggaagaaaagcatacgaacaatttctatagcgtacaaacaccttgggacgagatagccattaatgacaagatgcctttcttgcagaaactgaacgatcagatattcgcaaaggacaagcgggtcaccaaggtgatggcctctttgggagacacgacctctcatatcttattctgtaactcggaagggcagatttattacgattatcgcccgatgagcgccttgagcgccgtctgcatcatggaggataacgggaagatcgagaactcgtacgccgcacgggcttttcgtatgggagcggaattcctgacggacgacctgatcgacgagcttgcccaagaggcagtggataagacctctatcttatttcaggcgatcaagccaaaaggcggggaaatgcctgttgtcatgggtgccggtggctctggcatcttattgcacgaggcgatcggccatgctttcgaggcggatttcaaccgtaagaacacctctattttctccgatcagctgaacaagaaagtttgcaacgagcatatcaacgtggtggacgacggcacgattcctttcaaccggggctcggtcaatatcgatgacgagggtgtggacggacaaaaaacctatatcgtacgggagggagtcttgaccagttatctgcacgatcgtatcagcgcaaaacattacggcatcccctctacgggcaatggccgccgggagtctttccgtcagatgcctatcccccgtatgcgtgccacttatatggaagcgggcaacgtgacggaagaggagatcatctctaccgtaaagaaaggtatctatgccgccaacttcacgaacgggcaggtacagattggcgcaggcgattttaccttcttcgtgaaggatggttacttgatcgagaacggcaagctcacccaacctatcaaggatatcaatatcatcggtaacggcccgaaagcgttggcggatatcacgatggtgggtaataattataaaatggataacggcacatggacctgcggtaaggatggacagtcttgcccggtaacctgcggtatgccgtcggccttagtcagcaaacttacagtaggaggagaaaactaatatgataacaaacgaaaataagaaattggctcaatgggccatggaatatgccttgaagaatggttgtcagtcttcacgtgtcacgctttacaatggttccagcagttcgtttgagatacgggatatgaaaatagaccgtctgcaacaggcgtccgagaacagcatggtggttcatttgttcgtggacggccgttacggctcctactctaccaatcgcttggataagaaagagctggagaagttcatcaaggatggtatctccgccactcgtttcctcgccgaggacaaggctcgcacgctgccggacgcttccttgtattataaaggtggggcggcggacttgcgattggtcgacccgaatttcgactccgtgcaaccggacgacaaggtagcgttggccatgagcgtctgtgaggaaatcatgggcaaagacgaccggatcatctccgccaacgcttcctacagcgacgagaaggactttaagtacatggtagccagcaacggtttcgaaggcgaggcttctggttcctcttatggcttggtggggagtgtcagcatccgtggggagggtgacgcccgtcccgagtcttattggtacgactcttccttgtattatgacgagctggtgaagaccggtatcggtacgaaagcgctggaacgggtgcttcgaaaactgggacagcggaaagtggcgtccggtaaatataccatgatcgtggataacatgaactccagtcgtctgctttctccagtaatcggagccatttacggttcctccatccagcaaaagaactctttcttgttggataagatcgaccaaaaggtagcgagcgacaagatgaccttgatagatgagcctcatttggtaaaggcttccggcgcacgttatttcgatagcgagggtgttgccacgaaacgtcttccgatattcgagcagggtatattgaaaacgtattatatcgatacgtattccgccaacaagatgggcatggaacaaacgatcggctctccctcgattcttaccatgcggaatggtgataaggatctggacggattgatcgcctctatcgacaaaggtatattggtgaccggcttcaacggtggaaactgcaatagcacgaccggcgatttctcgtatggtgtggaaggtttcttgatcgagagaggcaagctatcccaaccgatctccgagatgaacgccacgggtaatatgctctccctatggagtaacctagcggaagtcggaaacgacccccgcctatcctccagctggcgaatcccttccttgcttttcaatggggttgattttagcggattataaatacaagaaacaacatccggaagaacaagaataaaagaagccggaaccgctaaacacagttccggcttctttatttttccttacaccaaattatagatcgctataaaatggcaaaccgttcccccgagaacgaataaatgccatgcggaatgcatatatttatatttatccagaaagaaaaaaatcgttcctaaggaatagaacaagcctcctccgatcaaccaatataagacatacatcgaatccgtacgctggaaaacatcgatcaatggtttgaaagcgataatcaccacccagctcatcagcagataacaaaccgttttcagattatcctttttcttcatccgacggaagctaaaccatacgccgataaccgctgccagccaaaccgtaataaataatccccagccccagaaaccctcgtcgcggagagccaccaaggtaaatggcgtataagtacccgcgatatgcaaataaatagcgctatgatcccaacagcgcaactggcatttccgcttgggatcggaagcggcgtggtaaaaggtagaggtcacatacgaggaagtcatgcacaacgcataaacggcgaaactaccgatcacccacggatcacctgtacgaatcccggcgatcatcaagacgacaatcgccgttaagccgaacaacatgcccgcaccatgcgtaagcacattcgctacttcctcaccatgagtctgtctttgttttctcatccatccgatcgctacgactacaaggcgctagccttgaaaccggcctccgatacggcggaaagaattgtctccgccggaagatcggttgttatagtcaatgttttatccggggatttcaagtcgatcgaccatgcgtcctcttttactaatttattcaatttagcgccgatagccgccacgcatccgccacatttagcgtttgtcttaaattttaatgttgccatatctctacttattatttaaagtttactccatttcaaccgtaagctatttaataccaccgacacggaactgaaagccatcgcagcactcgccaacatcgggttcagtaacaatccgttcaccgggaataagacccccgccgccaatgggattccgatcaaattatagataaatgcccagaataaattctggtggatcgagcgaaccgtacgtttcgacaagcggatcgcatccggcaataacatcaaatccgaggtaatcaacgtgaccatcgccacatccatggcgatatccgttcccttacccatcgcaatgctcacatccgcacgggccaaggcttgcgagtcgttgataccatccccaaccatagccactttccttccggcggcttgcaaggaacggatatactcctccttatcgctcggcaagacatccgccttataatgacggatatccagcatggccgcaacggtcttggcggtccgtttcccatcgccggtcaataaatgaacctcgatacccatttctttcaaggcctctaccgcctctcccgacttaggtctcaaccgatccgaaatagccatgaccgcaagcaattccgattcccaaccgtaataaacgatactcttgccatcctcttcccaccggatgatttcccgcccagcctcgggcggaaccatcgccttgaaggtttccaaaaagcctttgcttcctacccaatacgtcacgccatgtacctgcatttggataccacgccccgttacgctctcgaaactatcagcgtcgatctccgcggcctccgttcctttcaaccatgagaggatagcggacgccaaaggatgctcagacttcatctcggcggtataaaggatatccagcatatcccggcttgcctccgatacccagaaagagtcagtcacctcgggtacgccctcggtcaaggtcccggtcttatccagcacgacggtatccaccttacaaaggttttccaaggcaaaagcgtctttgatcaatatatgatgctcggcgcctttacccatcccgaccatcaaggcagttggcgtagcaagtcccaacgcacaagggcaagcgatcaccaataccgataccgccgataagagagcgtacgagaagtacccgcttcctcctactaccagccagacgataaaagtaagtatcgccaatccgacaacgatcggtacaaatataccacttattttatcaacgatacgctgcacgggcgccttacttccttgagcggcttgtaccatctgtacgatttgtgataatacggtagcgttccccactccggtcgcctccatcaagaaagcgcccttttggttgatcgtcccggccaagacccggtcaccttgtgatttcacgacagggatcggctcgccactcaacatgctctcatccacggaagaggaaccttgagacaccgtgccgtccaccgggatcttctcaccgggacggacactgacaagatctcccacccgcaagaacgagatagagacctcttcctcctgaccatctcgcacacgacgggcagttttaggctgcaatcccatcaagctcttgatagcggaagaagtgctgttcttcgcccgctcctccagaagtttacccaacaagacgaacgctatgatcacgccggatgcctcataataaacatgcggctccaatcctttctcataccagaactgcgggtatacggtattgaagaaactgaacaggaaagcgatcgaggtactcaacgccaccaatgtatccatattggcgctaccgtgcaacgcatggcgcacgccgttcacgtagaacgaccgcccgaacacgatcataatcaccaaggccagcgccatcatgatccagttaccgccgggcgtatgcataaacaccattcccagcagggccagcggaatggaaagtacccacgccccgatcgtattccggcgtagcttccggtaatgctctcgtgccatctcttcctgtaccgccgtcggatcctctacctccacgaccaaatcgtatccggcctcctgcacggcctctctcattttctgaggagtaatcaaggatggatggtatttgacggaaagcgtattcgccgcgaaattcaccgatgcctcttccacgccgggaagtcccttcaccgtattctctacgttattggcacatacagcgcaactcatctcgagaaccggtaatataattgtctccaaatctttcatagatcgtatcacctgtttagttatatataaatgaataacaaagatacgataaatatgattgcaaccagattgcaaactttacgaaacagtatttacgtacgttaagaaacctaggaacttaatagatttatttgagaaatatgactattatttaacagggaaatacccgacatttgtaaggattttcaaaccaattactaaaacttaataacaatatgattctagactcacttgagaactctaagcggatcgaatgtatccatccgctgtttaagcaggcttttgactatgttaagtctactgatttctcaaaaatggaagatggtaaatacgatatagcggacgctggtttcacggttagcatcgccagcctcttcggaaaggagaagtcggaagcggccatcgagacccacaagaaatttatcgatatccaattccccttattgggcgtagagaaaatcgggtggaaaccgggagatcaattactagaggagtccgttccatacaacgaggagcaagatatcgccttttatatcgacaaacctaccgcctatacgaaaatctatcccggacaattcgccatttatttcccggaagacgggcacgccccgggtatcggccaagggaatatccggaaggtggttatcaagatcccggtccaatagtatcgaataccctatctgttccgcaagaataatcagctgaatacttatatattctatatcggatctacttctattctacaaaccacggcgtggtctttgtaaaccacgccatgatctgtaaagaccacgccgtggtttataggattcacgacgagaatcaaggaatagatacagatacgattatctttattcataagaagatttccctattcaaccgtatattcgcatatatgcgtttgtaatactttattcacctcaaatccacttaaatctcgtaaattcttgttacctttgatgcccggtacaaaataaaagtaatacaaaggaagatgatttcagaagaattgaagaacgacctaaagataaaatgggatcggatgagagatggtatggcaaagatgggtatggatgcctgtttgcttaccgtagatgtaaatctttattatacgacaggacaaatctatagtggttatttttatttgccggtagacggtgagccgtggttcctgatcaagcgaccgaacgggctttcaggacatcaagtggaatacatccgtaagccggaagacatcccaaccttatttgcggaacgaggaattaagatgccgaaaagactcttattagaggcagatgagttaacttataatgaatatatccgtttacaaaaggtattccaaccggaggaggccggtaacgccaccgctttcatgcgaaaccttcgccgggtaaaaaccccttgggagatcgggcaattccgtatcgccgcccgcaagcatgaggctacttatagcgagatcccggaatgtttccgtcccggtatgacagacttggagtttcagtacgagatcgagaaacgtatgcgcaagaacggctcgatcggtcttttccgtgctttcggagccaatatggatatctatatgggcagtattctcgccggggaaaacgccgagaccccatccccttttgatttcgctttgggtggaggcggcatagacgcttcttgtccgctgggcgctaacggtactttattaaaagaaggtaccgctatcatggtggatatggccggcaattatacggcttatatgacggacatgacccgtgtcttctccgtaggccgcctgacggaggaagcttatcgggcgcatcaagtggcccttacgatacagcaggaggtggaaaacgctacccgcccgggaaccgcttgttcggatttatataatatagcggcgaatatcgctaagaaagaaggtctttcggctaactttatgggaaccgagcaacaggctaaattcgtaggacatggcatcggtatacagatcaatgagctacctgtgcttacccctcgctcgaaagaggagcttttaccgaatatggtgttcgccttggagcccaaattcgtgatcccgggtgtcggtgccgtgggtatcgagaacagtttccttgtaacggagacgggcgtggagaagttgacacggttcaacgaggagatcatcccacttggaaattaggatttaatagaagaatttgttatacattattaaattaaagcacatgaaaaaaacattagcttttctgcttttgctggctattatcatcatgccggccaatgccgtggaaaaggagaacgtgaagcctgtcaagaacgtgattctcttaatcccggacggaacctcattggcgactatctctatcgcccgttggttgcaatggtaccaagatcccagcaaaccgaaattgaacatcgacccgtatttgtgcggaacggtgcgtacgcattcttctaacgcccctatcggcgactccgctcctactacatcatgctacatgaccggacaaccgagccgtacgggttatgtatccacttacccggaaaacgacggtgataacgatatctacccgaccgacccggcccgtgccttccaaccgcttaccaccgtattggaggctggaaagatgttgcagggcaaagccacgggattggttttcacttgcgaattcccgcacgctaccccggcggactgctccgctcatagctacaaccgtggtaaatacgactggatcgctccgcagatggttcataatgatatcgatgtcgttatcggtggtggagtttctatccttacaaaggatatggaagattatctattggcgaacggatacggcgtatatagaaacgacctgaaaggtatgcgtgccgataataatcagaagatgtgggctttatatggcaacaaggaaatggcttacgatatcgaccgcaatccggaagagcaaccttctatcgaggaaatgactcgtaaggcgatcgacaaattatccaagaacccgaatggcttcttcttaatggtagaaggcagtaaggtagactgggccgctcatggaaatgacccggtaggtatggctaccgatttcttggcattcgatcgtgcctgcggtgccgcattggagttcgcacgcaataatggcgagactgccgttgtcatcgtacccgaccacggaaacagcggtatcagcttaggtagaaaagattgtaaaggttacgataaattgacgaaagaccaattgttccaccaattctccctgtataaattgacagccgagggtttcgccaacaaggtaaacagcgttcctaactcagaagtgcaaaacgtattccgcacctacgccggcttcgagctgactccggaagagatgaacgcgttgaacaattgcaaggactacaagaacagcccgataccagaagaccaacgcaaaccggaagataattcctccatgtacagtggctcgttaaccggattgatggcgcatatcatcacttcccgcacttgcttcggtttcacgaccggcggtcatacgggcgaggaagtattcctagccgcttaccatccgcaaggaaccttacccctaggtatgaatacgaacatcgagctgaatgagtacttatgcaatttgttcggattgacacacggaaacttggaagatcttacaagcaagaacttcgcacgccacacggacgtattcgaggattacacttgcgagatcgtccctgccgccgacgagaaaggttctccaaccttgatcgttaagaacaagaaagataagaaaaaacagctaacgatcaccccgttctccaacatcgtgaagtccgggaagaaaggccaagatgagatacggttaaactctgtcgtcgtttatgtcgataaaaataacacattctatcttccggcaagtctagttgatttcttaaaataaaatataaagcggaggcccttcggtctccgctttttttatacattcgcgtacataagacagaatatacacaacctatgaaaagtaaaagtttagtttctatcgatcaatgttccaaagaggacattcttcgtattctggataacgcaaggaagtttgaggaaaatccgaaccggaaattactggaaggcaaagtcgccgccaccctgttcttcgagccctctacacgtacgagactgagtttcgagacagccgtaaaccgtttaggtggacgggtgatcggtttctcggacgcttccacgactagttcctccaagggcgagaccttgaaagatacgatcttgatggtaagcaattacgtggacttgatcattatgagacatcatctggaaggagccgcccgctatgcttctgaggtgacggatgtccctatcatcaacgctggtgacggggcgaaccaacatccctcgcaaaccatgctggacctgtattccatccgcaagacacaaggcaaactggataacctcaccatcacgatggtcggcgatttgaagtatggccgtacggttcactccttgatcgtgggaatgtctcacttccatccgaccttccacttcgtcgcgccgaacgagctgcgcatgccggacgagcaaaagaacttctgcgacaagcacgggctcaaatacgaggagcataccgatttcacggaagatatcatcaaccagacggatatcctttatatgacccgtgtacaacgtgagcgtttcacagacttggaagagtacgagcgggtaaagaacgtgtatatcctgcgtaatgacatgctgagaaacagccgtgagaacctgcgtatcttacatccgctaccccgtgtgaacgagatcgcttacgatgtagatgacaatccaaaggcttattacatccagcaggcacgcaacgggctgttcgcacgccaagctatcatttgcgaagttttaggtatatctatcgacgaataaaaacgaagttttatgtcagcagaaaagaaaaaagagttgcaggtagccgctttagagaacggtaccgccatagaccatattcctcccagccaattattcaaggtagcctctttactgggactggagaaaatgaacaatacgatcacgatcggcaataatttccatagcaacaagatgggatgcaagggtatgatcaagatcgccgacaaatttttcgaggaggacgagatcaaccgtatcgccatgatcgccccgaatattatattgaacattatccgtgattatgaggttgtagagaagaagacggttactttacccgacgagctgattggcttggtcaaatgtaacaatccgaaatgtatcaccaataatgagccgatgctttcccgcttccacgtgatcgacaaggagaagggaaccattaaatgtcattattgcgaacgtaagattaataaagaagacattatcattaaataattgaaagttgagaattgagaattgaaagtcaaagacctttgtggagctaattctcaattctcaactcgcaattgtaaaaactgcattttatatgaagcacgattggaaaccgggaaccatgatctatccattgccagccgtaatggtgagttgtgggaatgagccttccgagtacaatataataacagtcgcatgggtcggtacgatttgtacgaatccggcgatgtgctatatatccgtacgtccggaacgattctcttatccgatcttgaagaagaatatggaattcgtcatcaacttgacgaatcgtgagctggcctacgccacggattggtgcggggtaaactcagggaaagaccatcataaattcgaagagatgaagctcactcccggaaaagcgaccgtcgttaacgcccctacgatagacgagtctccgctttgtatcgaatgccgggtaaaagaggtaatcgctctcggaagtcatgatatgtttatcgctgatgtcgtaaacgtacaggccgacgaccgatatctagacccagaggcaggggcttttgatatgcagaaagcggatcttttggcttactcgcatggtaagtattacgggttaggtgaatttgtcggtaaattcggctggtccgtgaaaaagaaaaaataacggtatgaaaaaagtctaccttataggagcgttgctatctttcggtctgttagcagaagcccagagcttcatgcgtttcgaggacaaggcattcaactttggagccaaagtgggattcaacgccactttcccagtcataaactccctttccatcaatgggaaggaagcggagaatatagacatcgaatataaggtaggttatctggccgcggtcttttgccgggtcaatatcgaacggttcttcctccagcctagtttctcatggcatcgctccgagggaaatatccgtttttccatacctcaaagtttgccggaaaataatatgctgtccaatacatcggcaactaccgacctcttgatgatgaaaaccagttccttagaggttcccataatggtaggctataacctagtgaagaaagggccttacggacttagccttatggtcggccccaaattaaaatacaactataagatcgcctatacggtagaatcttccaccacgcatgtagaatacgtgaatgacaacaccccgttcggagtcaatatcgctacgggcgtaggggttagcatcggacggctattcttcgactttgtctatgagttcggattgaatcaagtggaatccgatttcgagaaagtcaacaatccagttcccgagattaattatgatatcaatattgacaagcgaacgaacgtgatgagtatctcactcggcgtactcttctaaaaagacattttacccatttttcaagtacttaaccaaaaccttatcgatccgggcaccatccatatctacgatctcgaactcaaagtccagccactttaatttctcacccgtcttcggtacacgttccaatatctctaggatcaagccactcaaggtattataatcatgctcggcatacaaatcctccatgtcgaaatattccaagaaatcatagaaagaatattggccgtccaccaaccaagtaccatcctcacgttgtatgatctcggactcctctccgacttccggtacttgtccgattaagccttccataatatccttcaaggttacgataccttggatacctccgaactcatccgtaacgagtccatatttcacgtgtgtctgcttgaaagattccaaggcgttatatacgctctggttctcgggaacgaactgtgccgggcgaagtacttgattgatcgagaaatccggttgatcgatccttccgaacaaatctttcagataaacgacccctactatattatcgaacttctccgaggccacgggatatatattaaataagttctcctccactttctcccgaatcttctccgtactatccgtcacatccagccaaaccagctcgctacgatgcgtcatgatagaacccacgttacggtctcccagattaaagactcgctctacgatgtcctgctctacctcttgcacctcgccaccgtcgaagccctctttcacgatcgccttgatttcttcctctgttaccctattttcctctttcgtatccacgcccgtcatcttcacagccaacgccgtactctttgaaagtagccaaacaaaaggagaggatatcaaggaaagaaaattcatgggtttagcaactaacatagagaccttctcggcacaccccatgccgatccgcttcggtaccaactctccgaatataagtgtaagatacgtcacgataataacgatcgtcgttttagcgatccccaacgcatacggttctagggccggtatttgcgctattataacagcgaaattatgagctaacgcctcgccagagtacaaaccggtcaagataccgatcaaggtaattccgatctggatggttgagagaaacttatccggctcatttgccagcttcaaagcagtgcccgcagatttattaccacgtttcgcttcggtttccaacctagccttccgggctgagaccaaggcgatttccgacatcgcaagaattccattcagtaagataaggccaataataatgactatttccattaattaatttatagtttgattatgctgcgaagatatataaatactttaatatataaaacaagacacctaagtgtctgcgcttacatttaactaaaaaaccttacgaatcccttgcggtttcaaaagaaaggcgtacttttgcatgacaaatacaaagtgtgattagaaatgctcgataaaattaaggctctgcttcaagaagtagagaatatgaaagcggcaaatgccgaggaactagaagctttacgtataaagtatctcagcaaaaaaggcgagatatcggcgttgatgaatgatttccgtaatgtagcggctgatcaaaaacgtgaggttggcaaatacttgaacgaactaaaggaaacaacccagagcaagatcaacgaattaaaagaaagctttgagaatgtacagaccgcaaacgatgatatcgatttgactcgtacggcttacccgatcgaactaggcactcgtcatcctctatcacttgtaaagaaagaaatttgcgatatattcggacggttaggattcagcatcgctgagggaccggaaatcgaggacgactggcatgtcttctcttccttgaatttcgccgaggaccatcctgcccgcgatatgcaagatacgttctttatccagcataacccggatgtattgcttcgcacacatacttcttccgtacagacccgagtaatggaaaagcaagaaccgcctatccgtatcatctgtccgggacgtgtatatcgtaatgaggctatctcctatcgtgctcactgtttcttccatcaagtagaagcgttatatgtagataagaacgtctcattcgccgacttgaaacaagccttgttgttcttcgccaaggaaatgttcagtccggatacaaaaattcgcttgcgtccttcttacttcccgttcacggagccatccgccgagatggacatctcctgcaacatttgtggaggtaagggttgccccttctgtaaaggaaccggttgggtagagatcctcggttgcggtatggtagacccgaacgtgcttgagaactgcggtatcgatagcaaggtttattcaggctacgcattgggaatgggtatcgagcgtattaccaatttgaaataccaagtaaaagacttacgcatgttctcggaaaacgatgttcgtttcttgagacagtttgagtcggccaattaaattgaaaacctaaatcatttaccatctccccgggccttaacctagcccgggggaaacacactaggttgatatgataaaggtttttcttttaataataggaggagctatcggatctgcgctacggttcggagtttccacgtgggtgcaacgatcgatgctttactcctttccttttggtatcttgtcggtcaatgtgatcggctcctttttaatcggcttctgctggagtatagcggaagcctataatttttctatcaatacaagagctttcctattcactggtcttttcggtggtttcacgactttctcttcttttgctctcgacacgatggtacttatgcgcaccggagaatacaagatggtactactcaatgtacttgccagtaatatccttggtttgatagcggtcttccttgggatcatacttgggaagaatatcattacaatgatcaagtaaataaataaaaaaacacggcacaagtcagtcatgacaaggccgtgttatatcgaataaagctgtttccaaattatctatttactaacctcaagaatactttcttagaaaaataagaagctctatttttccgatataattgccatccagattatagctaatcaaatcatgtccccatccattaaacagcaaacgcccgttcaactcgtccaccaagcagtctacgtttctatagccacccggatccttccctacatgccctatctgacatttaaactttcctgtagccttatcaaacaaaagacattgccggttagcggaagtgatcagaatatatttatccaataacttgatatcaggagaacttccgactagacaatcatccctcgtctctaaagggacataccggatctcatcaaaataatcagaggctttcagctcggcaggcgatgagatagctttacctacctcaatcacccgcttgctcgcttcttcgttttcacgctccatacaggaggttagaaacattcccgcacagagggagccgaacaagcctaccttgcatatatacgcgaaaatcatttcttcaattttatctcgataacgccattacgacctttctctccgaatttagcgatcgcctcgtttcctttgtacacattcatagacgcaatacgatcgggattcaaattgtccatcctctctttagaagattccatcccatcgatgtagacaataccggagaaagaggacttttcctttgatgcctccttagcagccttctcattgatgtctatggctttcatggcctcctctatggctcggttgatctccggttgaatcttctccatctcggcggcgatagtctcatttatcttggcggcctctatcgccgcttgcacagccttgtcgatctcagcctggtgtttcgccatttccgcagaaacgatctcgtcgatattcgccgctttcactgcctcttcaaccgccttgtcaatctccggctggtatttctccatcacggccgagaccttttcctgtatcgcttgcatatctttttcagaaacgaccgaatcccttgcgagggtctcaacttctacatttcttttaggctcttttttttcctgaaccggaataatttcgctaattttgacactcgaaatcttctccaattcgtgagagatttccggacgggcaaaggctaccaccgttaaggctgccaacgggagtacatacagatacttcaaccgtgcccatggacttgatttttgttttaacatcatagctattcgctttttaagtgaactgtgattaaagctgttggccatagaagtgaagcgctgtgcaccaacagcttttttaattaataataattgatatctttttgcgtcgacgccttgatttaatacgctctcgtcggcctcgtattcatggatattttgcaattcctgtctcaacaaccagacagatgggttgaaccaatggaacaggatacaaatctcggagatcagcagatcaatggaatgacgggcttttatatgcgccatctcatgcgtcatgatctctatcccactttcctcaaaatccttccggcttattacgatcgtttgcatccaactgaacggggcgactggttggtccgtaagaatcagatggattccgtccaccagcttcggtgtaccttgtctcatcaaccgaaacaaggcataaaatgaatatgcgaattgacaaagcgttaatatccctccgattatataggctatcaccataactcgtaaccatacaggttggctagcggattctgccgacgttctcatggaaaccgccgctagcaaattctccaaatccatgaccggacgctgaatggccgtcgctttctccaaagtaatctcacaaaatgggatgataaccgaaagcatgatcaagcttaataaagcgatccggttgaaacgatggaaggtatcacggctcaacaatagcttataaaacagataaaatatcgtcaagcacacggatgatttaaggatatatacaaagaagattcccatattcgctcttatttacgattcccttgttctacatcatctattagttttcgcagatcatccacagagatatcctcttccttgatcagcgtagagacaacccccagataagaattattgaaatacttagcgatcacatttttcaaagtaccgttactatactccttttctgttaagaccgcataatattgatagctattcccgaaattcttatgggcgaggaaacctttctcctccaagcctcggacaatcgtagaaagggtattgaaatgaggtttaggctcctcgtaatattcaagtaactctttcacgaacagtgggcctttctgccagaaccagcccatgatttcttcttctttcaccgtaagtcgtttcataaccttatcttgtttgcgacaaagtaactaaaacttttagttaccaaactaatttgtatagttaataaactaaaagagatagtttattcattgatccaatcaaaaaaaccgccccgggaatgtccgggacggcctctattatatccagatgtttgaatgattaggcgacaggaatcgttccgccaatcaagatcacaaccaataaggccaagatagcgtacaactctgggaatacggccattaccatcgtagcaccgaatacgttgtgtccggcaccaacaccagcgataccattcgcgcaaacttgagcttggcggattgaagagtaaaaaccagcgaaacctaacactaaaccagcgccgaaaacagccgtagcagccaacatggaaatatcagcgaccaagaacttctgcatcataaagtagcccacgaatccatacaagccctgtgaagaaggcaacgcacttaaagcgatgtacgtacccagagcatccggatttttcttcatcgcacctaccaccgcattacctgcgatcgtaacaccataactactgccgataaaagttaaacctgtcatcaacgcaatacctacataagctaataaaattggttccataataaaatgtgtttttaaattattcttttattgttttattttctcgtttaattgttatgcttttctgaatggctcataggccttacctccaccttcgaactccgcgttcttgtaatattccacgaagatcaaacgaagcgggtgtaccaaggagctgatcgtacaaagagcgatattgatggagtgacccactaacaagatcaacaacatacagatcgcacgtgccacgatattcataccgtctgtcatcgtaaccgccaacgtattaaatacgccacccaagatggaaccggtcagaccgatagcgaacaaacgaatgtatgataacgtatcccccagcaatccggaggccatattgtacgtgttccaaagtccggtaccaaagttcaagaatacgttcttgcccggtgtattgtacaaataagcgataaccagacccaagatggcgattccgtaacataccataacgacagcgttcggcaagtgaacgttcaacatcggaagtccgaacgccaatgccaaggatatgatcacgaacacccaagcgaacggagcgatactgtgtttcgttcctttctgtatcttgatcttgtaagcagcgacacatttaccgaatatgatctgtaccaaaccgatgacaatagagaatgtcatcaagttgtcgctattcacaaagtagttcttgatctttgacaaagccgggatatccgccaaggccactccgaagaaagatcccgtacaagtacccaccaataaggcggcaaagcctaaatactggaacaaggtcaaataaggcttgaaatccgggttcaccttcttcttcaagatcgtacaagcgatcatgaccagcaagccatatccgccatcgccgaaacaaagtccgaagaacagcataaagaacggggcgaacaacggggtcggatcaagttcaccgtaattaggcaaggagaacatcttcgtgataggctcgtacagcttactgaatttattattccgtagcttgataggcaccttatccccatcctcgatctctaattgctggaagaaataaccttgcttatccagctcgtgctccaaggccggagcgttttccgtcggcacccaaccttccaacaacatgagcttatcacccgcttgccgatctgtctgcactaacgcattagaaagattaaactcgtcctgcaggttcttatcgaattcctccaacgttttataatcccccacggcacgatgtttcagctcatcctccacattctggatatccttggtacgttgatccagacgggcacgcaacttcgccaatccttgaaccggcatcttcggacgttcagcgtctatatcgatcaaggtaccttccttggtaatcgtgataaaatacgttaccgattggaagttattgatcagaatggcgttatacagcacgccccattccggctcgtacttagcagtaggacaggtaaagaacgtaacatcgtatcccgctcttttcagacggttgatattctgataactgaactcaccccatatttccatataagccagatccttctcgatcgattgcttggaagcgatcaattgcgctttcttatcttgcaattcctctatcttacgcaccaacttcaagccttcctctttcgtcaactcacgggccggggcaaacttaacgtctttctccgccgcatggaggttcttaaagtaacgcatcagcgtattgatctgtttacgctcagccagaagctcttgcaacctctcgttatccatcacggagtttgtctccttgatatggacgacacctaagtcacgaagcgtagaaaggaacgtatcatactccttatggtacaccataaaggcatatttactcatctttactatcatacctcggcctcctctttttcttcttttgccttacgtttctcctgattggctctcatgatcttctgtgaggacttagaaagactctcctcgtcttccataaaccgtttcaccttacggatcgcatccttataacccggaatctgtaccttctcaaacaggttcaccttctgagtggtctttttcctagcatgctccaacaactccagcttcatgcccgagaactccgcctcgataccggtacgagccagctttttcagcaactcgataccatccgtataccatgcgggggcattaaagagactatagtgtccgatctcgaacttgatctcgtccaataacgggacgatcacgccggcgatcttcttcgtggagagcgtaacgtccttcacggagatcagctccggattgaactcgttccacaaagccaccatattctcgtaactctgaatctctcgttctagctgaagttccaatttattcacttcgtccttggtccgcttcacctcgatacgcagggcgctctccttgctcttgatcgtaggcagggagcgttcacgcatcttcagttgcttttccaattgctgaagagaggttttattatattgaaactttattgccatgtttatttaatttacttccagtacttatcaaccaatccttgtttgatatttacctcctccgggctgaaatatctagcgaacaatccccaagctacgtccagcatctccgtcgtatccaagtttacgtcgatagccaacagcttagaagaataatccttggcgaaagacaaggtacggttgtcgtagtcggtcaagtcgaaaccattctccagcttggtcttagcgttggcggcatcggcatacaaacgtacggcggcgttcattacctgtggatgatcctcacgggtcttctttccggttaccagctgtttcaaacgagacaagcttcggaacggatcgacgatgaccttacccacatcgctatcacgacgcaaatacaactgaccttccgtgatataacccgtattatcaggtacggcatgcgtgatatcaccaccggataaggtcgttacggcgataatcgtgatggaacctcccgccgggaattgaacggctttctcgtaaatcttcgccaaatccgaatacaaggaacccggcatagagtccttagacgggatctggtccatacggtttgatacgatcgccaaggcatcggcgtagttggtcatatcggtaagcaataccaagaccttctcgttcttctccacggcgaaatactcagcggcgctcaacgccatatccgggatcaagatacgctctacggacgggtcctcggtcgtgttgataaaactaacgatacggtctagggctccggcgttactaaatgtattcttaaagaacaggtagtcgtcgttcgtcatacccatacctcccaagataatcttatcggacttcgcacgcaaggctaccatcgccataacttggttgaaaggctggtcggggtcggcgaagaacgggatcttctgaccggttaccaaggtattattcaagtcgataccggcgatacccgtagcgattaattcagagggttgtttacgacgtaccgggttcacggacggaccaccgatctcgacctcacgtccctcggggatcgggccgccatcgataggctcgccataagcgttgaagaaacgtccggctaactggtcacctactttcaaggaaggggccttccccatgaataccacctcggcattcgtacggataccttccgttccggagaatacctgcaacgtcacctcgtcaccgataatctttaccacctgagccagctttccgtctacagaggccaactcatcatacccaactcccgttgctttcagcgaacaggtagcttttgtaatctgggtaatcttcgtatatattttttgaaatgcttttgttgccataactcttttaattttcgattctctccttcaaaagttcatccagttccgtattaaacttcttgaattggtcactctcatattccgaatagttcatctgcttaaagatgttgatcatcttcttaaagtagtccataacctcaaggaagttatcaaacttaaactctgaacggcaaacgttcacgactctatccagcatgaattcctgacgttgcaacggagtaaccgcatcaatggcatcgaaagcatcctgttgcaagatcacgaagtcaatcaactcggacttccagaatgtaacgtgatactcgacaggcacaccatcatcacccaagatattgatttgctcggagatctccttaccacgcaacatacgggtcttgatctcgtttactttctcgatccattccggggagatatgtttagcgatgtattcctgaaactctggatactcgatatacttggaataactctcgatcgggtttacggccggataacgtttacggtcggcacgctcctgctccaaggcatagaaacaacgggccaccttcttcgtattctcggtcactggctccttcaagtttccaccggccggcgataccgtaccgatgaaagtgacggagcctgtagcgttgttattcaaatgaacgaatcccgcacgagcgtagaagttcgccacgatagcggacaagtccatcgggaaagcatccggtcccggcaactcctccaaacggttggacatctcacgcaaagcctgtgcccagcgggaagtagagtcggccatcaacagaaccttcaaacccatgctgcgataatactcggcgatggtcatcgccgtatatacggatgcctcacgagcggctaccggcatgttggatgtattggcgataatgatcgtacgttccatcaatttacgtcccgtatgcgggtctaccaattccgggaactccgtaaatacctctacgacctcattcgcacgctcaccgcaggcggcgataatcacgatatccgcttccgcttgtttagagatagcgtgctgaagcaccgtcttacccgtaccgaacggaccggggataaatccggtaccaccctcaacgatcgggttcacggtatcgatcgtacgaacgcccgtctccagcaatttgaatggacggggcttttccttataacaagtgatggctttctttaccggccatttctggatcatcgtcacgtttacgtccgtgccattttcgtccgtaaggacagccatcgtatcattgatggtgtattgtccggctggaaccaccgacttcacaatataagatccctcgaacttaaaggggaccataatcttatgaggttggaaattctcgtccacctctcccagccaatcaccggcgctcacggtatcgcccgctttagccagaggcttgaaatcccacttcttatcattgtccaacgcaaacgtataatcgccacgtttcaagaatacaccttccatcttgtccaagtcattctgcaaaccgtcatagttgcgggacaacatacccggacccagcgtaacttccaacatatgcccttggaattcagcctcgtcgccgacacgcataccacgtgtgctctcaaatacttgtacaaaggcattctttcctatcaccttgattacttccgacatcagcttcacgcctccgacagaaatgtaacagatctcattctgagaaaccggaccatccacctctacggttactaggttggatacgattccttttacaattcctttcgtagccataatttattttatattgtttcttttaaattcttccaacgcattctcactacccatcttcatggcgcctaccaattcacggaaagtcttctcgcctctcgccttatccaaggttacccagcgctctatcatctccaatttcaataaataagcgaatacactctctatgtcgaacgtcttgaagaaggtattatcgtccagccatttccatttcaaaagatcgattttcttctcacgaacgatcagatcggtctcttcggcgatgcgttgtaactcgggcaaatattccacggaatcgcccaagccgaaatcacgggcgttcgacgtacggatattttctgctatctcattatgccccacgatataattggccttatcaaatccatatttacggcaagtgatcgcagtaagaacattgttgatattcaggttaagctcgaaccaatcggccacgaacttattcccacatttcatggcatattcataatataacgcagccaagcggtcttcccatgatatatattctttctcatttttggtgtccttagcctcttcggctagatacagtttaaaaaagtccacgaaataaggcgggagattatcatttttgggaattttttcctcatccttcaacgctttatataaagtattgaactcatcatacgttattcttcctctttgatccggatcggagtccggtcttttagcgtgagccagcagatttatattatcatatttcaaataaaataaatcaatcagccttttatccttagaagatagcatatcctctatttctgtccggaactcacagactgaataggctagtttactatcatccaacgctatgttaggaagtccggagattaagtagtaatacttactcatatcagaacagcatttctactaattgcggacgcaagaactctttaaagaactcgatgaactcgtcttcgccaaacgtcactttataagagccatccgccgggataatagagaaagacgctttctttccgcttaccttctcgatcttataccctttctccaacaaacctttggcattggcctcaaaatacgccttcaagccctcggcatcagaagcttggatggtcaagaactcattagcgggccagcttttcacaagctcgaggatcactttctgcatataggcgggatccatcaacgccgctttcacattcgaactagcgatatcaccagtgataaggtttgtcacctcgctctttaatgcctcgacagactgggtggcgaacaatttcaattcggcttccgtattcttcttcaactcggcagcttgtttctcggcagccgctacgatacgtttcgcttccgcttccgcatctttaataatcgtatccttttgagcattggcctcagcgattatacgccccgcttcttcgttccccttctctacaccttccttgtagatcttgtctgttagttcctgaatctttgtatccatttcctattatgtatttgaattgtatttttcaatagtaaacgcccacaaagttattatttttcgcggattaacatcaaaataagtgtgaaatcaagctaaaaaataacactagtcaagtaaaattctatttacattcgtctatattgtatttttgttcgtctatttgtatctttgtgagtcaaaatacaaaattaacatgtttacgattagaaaagcgactattgatgaccgttctcttattcatgaccttgcctcacgcatttgggagaacacgtatggaaagatactttctaaagagcaattggattatatgttcgatatgatgtacgctccggataacattcttaaacaaatggaagagttacatcatcaatattttattatattggcggacgatatgccggcaggctatttatccatagagaaaacaggtgaaaacacgtacaattttcaaaagatctattccctaccggaaatgcatggcacgggaatcgggcgttttatcatcgaacaaggtattaactatttgaaggaggtacataccggacctttcactatagaattatatgtaaaccgctacaatcccgccataggcttctacagacatatgggattacgggaaataggcacacgggaccatcatataggaaacggctatttcatgaacgattatatcatgggcatggaagtggagaataaatagacagtcatcccctattcatatatttatatatagaataggggatgatgattgtcaacgggtcttccctcttttcggattacgaggtttctctaggattcgtacactactaacttttacagagtaaataacagcgatcctatcattcttcggattctcaatcgcaagttgagagttccagattttcttttcttgttttttatccataacgctacaatttaatagttcatatttaataagtcaaaccttgactgtctttttctcttttccttccgctatctcaaccagataaaccccggcgcaaatacagataatggcgaacgtctgtgtccaactgaaacggtcttgcccgatcaatagggatgtaatcgttgccacgatcaagatcagatagccataaatagccaccaacgtagttttcaaatacttcaatccgataggaatcaacagataactgattaccgtagggaaaataagcacaaacatcaatacggcaaaaggccaccaatgaaatggctccgagaataaaggagcatgaaagccttctatcggcaaaatcaatagactggagaaagcggcgcccgtgaatgtatatcgaagcatcgtcatcgtccctactttttgtaagatccgctggcttaataccagatacacggcataaaacacggagctagccagacatagcatattcccattaaaagcgtccgccgctaaatcgtcgctttgctgggtcaagatgcaaaccaaggctccggataaaccaatcaagataccgagtattttcatccaagtagccttttccttataaaagaataccataatcaaaaatacccagatcggttgcaagctcgtgaaaatagaactcgagaccggcgttgtcttgctaagccccactaaataaagaaacataaaaccatagataccgatagcgcctaataagaatagccacaccttatctttcgtcgtagaaacctccggtttcataaaccagccgatcacccaaaacgccacggccgcaaacacgcatcggaaagaagcgcccgtcaacgggctcatccataagggaagcaagtatttcaaggcgttcatattcaatccactgaaagtttttgagaccaccatgctaatattagcttctgttttcttatttttcactgtctatcgttttttagttttatattcgtaaatcatattttatcgttgaaaaggaacgagtctcgttttacataagcccagatcgtagcgaccagcgcaatacagagattaaaaataaacgcgaattgctggcttttgacatggaacatagactggaagaaatcgataataaacggacaaagtaatatcgccaaataattcatcgccatcacgaaagctaatgccaatgtaactttctcaggaatggccgtacgagtcgttttatcataagcgattggctggataacaccatatccgaaaccgataaaaatacatcccaatccaattagccattccgtacgagatatcaaaatcaaggccatccctaaagcgatcgccaatagactgacaaattttgtcttttgcttaaataaatcaacgatctgattcaagataaaaccgggagccataatagccaagaaaaacaatgatatcattaatccggaattaccgcttgtaaacttatattccttcattaaaaacggtaagttaaagctgactataatcactaaatacgtagccaatccataaaaacacatgatttgtaccagatgctttatatccacaccatatttacccggaaccgtgacgggatctgccgtaacaggggctttcacttctgatttcgatacgatcgccgactcattttccatactccttttcaagtatacggaaagtacgatggaaatcaagggcaatagataaacggcaaacggtaaatgccaattcacctccgccagatatcccgttaagatcgtggctaataccaacgttacattcgtaatagcagaacttaaaccaaattgcttcgtccggtatttcccgataaagaaacgagatatcaaaccggtcgataagggtacgatcaagccagatccgattcccattaaggcgctcaccgctatcaactgccacatcttattagagagtaagtatagaataccacttagggcaaagatcaccaagcctaattgcaatagacgtatctcatttactttctccgttaatttacccgacaatataataaatggaattatcaataacgatggcaaagaggaaagcatctggatatccagttccgtagaatgaggaaaaataacggaaagtttccctaatatcggagaaaccgctaaacccggtaatgcatttaaagcggagatagaccatatccctaccagagttataaggggaattgtgccccggcctgtctgtattctcataaagatttagttttacgtttttatctaatcaaaacaaacattttatgtgaaagttcatcattttcgctctttccaagaggactggacttgtatcgctaataaaccccaaataatgtaaatccaaaaaactttccaatccataatctgttttggcataaacgctcagtggaagcagtattccattgattcaaatcattttattaacaaaaaaactaaagaaaaatgaaagactcaaatttcagaaatggcgatgccaaaacagcgatttttggctcagaagtgatgttgacaccctctcctgtagataagattccagatggccctacaaccccggagatcgcttatcaaatggttaaagacgagactttcgcacaaacacagcctcgcttgaacctagctacattcgttactacgtatatggacgagtacgcgacaaaattgatgaacgaggctatcaacatcaactatattgacgaaacagagtatccgagaatcgctgttatgaacgccaaatgtattaatatcatggcgagtctttggaattctcccgagcaagaaaaatggaaaaccggagccttggctatcggttcttcagaggcttgtatgctaggtggtgtagccgcttggttacgttggcgcaaaaagagacaagcacaaggtaaaccaactgacaagcctaatttcgtgatctctactggcttccaagtcgtatgggagaaattcgcccagctatggcaaatcgaaatgcgtgaagttcccttgactttagacaagacgacacttgatccggaagaagcacttaagatgtgtgacgagaacacgatttgtatcgttcctatccaaggtgtaacatggacaggactgaacgatgacgtagaagccttggacaaagcgctcgacgcatacaatgccaagaccggttatgatatacctatccacgtagatgccgccagcggtggttttatccttccgttcttaagcccggagacaaaatgggacttccgtttgaaatgggttctttctatcagcacatccggacataaattcggattggtttacccgggattgggttgggttgtttggaaagacaagaaatatttgccggaagaaatggcattcagcgtaaactatcttggagcgaatatcactcaggttggtttgaacttctctcgtcctgccgcacaaatcctcggacaatactatcagtttatccgtctcggattcgagggctacaaacaaatccaatataacagtatggaaatcacgaaatacatccaccaagaaatcggtaagatggccccattcgttaattacagcaacgaggttgtgaatccattgtttatttggtacatgaaaccggattacgctaagaacgccaaatggacactttacgatttgcaagataaattgcaacaaagcggttggatggttccagcgtatacactaccgaagaagctggataactacgtggttatgcgtgtcgtagttcgtcaaggtttcagccgtgatatggccgatatgttattaggtgatatcaagaacgctgtagaggcattggagaaacttgaatatccgactcctactcgcatcgctcaagacaaaaacgttccggttaagggtaaggtatttactcacaccgcaatgagcaacgctaagaaataaaaacaaaattcatcaaggcgtgcatgaaaggactatcagtgttttcatacacgccttctttaatccaattcatatatggacaaaaaaataacgatcgcccaaataaaggaagtagctcaacaggcttacgatctttacaagacaaatacggatggtaagaatgccgattacattccttatctggcgaatatcaataaaaatctattcggaatcagtatttgccttttaaacggacaaaccatcgaggtgggagattccgaatatcgtttcggtatcgaatccgtatcgaaagtacacaccgctatcttggtactgcgccaatacggagcgaaagaattattggagaaaattggtgccgacgctaccggattgccatttaactccatcatcgctatcctattggaaaacgaccatccttctaccccattggtaaatgccggcgctatcacggcttgtagtatggtgaagcctgtcggtgattccaaacagaagtgggatgctatcgtagccaatatcacggatttgtgcggaagcgcaccgcagttgatcgacgaactctacaaatccgagtctgcaacgaacttcaataaccgctccatcgcttggttgctaaagaattacaatcgcatttatgacgatccggatatgtctttggatctgtatacccgtcaatgttctttgggtatcacggctaagcaactatctgtcgctgccgctacggtcgcaaatttaggtcttaatcctgtgacaaagaaacaagtattcgatgcggagttatctccgaagatcacttccatgatctctaccgtaggtttttatgaacacaccggtgattggttgtacacttccggtattcccgcaaaaactggtgtaggcggtggtgtcatgggtgtacttcccggacaattcggtatttccgcattcgctcctcctattgaccaagctggtaactctgtaaaggcacagcttgctattaagtatgtaatgaataaactcggattgaacgtgttcaacggtcaccgtgtgacgatcgttgactaatagacagaatcagtttaaacgaaaagtagtatagaaaaagtgtttcattacgatgggcagttataccatctaaatgaaacactttattttttgtatcaataaaaatcggatcaattctccgacacgacccaagccgaatcgtatacttccgtattcggggtcttataatacatatccttttcttgaggaatgcttaatttataggtcttcccacctgtcaccaacttccgatcacggagccaaggattaaaacgtttcaagtccgcataagtgatcccatgctctttagcgaaggccgacagattctgtatatcttggcttacagccacgtctacggtagggatcggcttatacaggtcacgggcacgaagcacaaaaccgtatttcgacggattctcgaaaatttgcttgatcgccatgattcgataaatataacgggtagtctcctccaccagccagagatcaaaggaggaatccgcatcttgtttgaccagctcaccggatatacgtcccatgccgccattataagaagcggctaccgccgcccaatctccatatttcttataggcggctttcaaatagcggcaagccgccccggtcgctttctccacatggcaacgctcatcgaccgtcggggtgattgtcaaaccatactcctttgccgtgccctccagtaattgccacatcccgacagcacgagccggagaggatacacgggggtccaaatggctttctatcaccgctagatatttgaaatcatcgggaatgccgttcgccttcaagatcggctcgatcaccgggaaataacggttcgcccgcttgatcagaagcatcgtcgtagaatggaaataagtaaagctactcaattcacggtcataggcttcccgcatatcatagcgggtaatatcgattagtttcccacaaaaaggaaccgaggacggaacatccggcgacagggtcatggatgagacaaccggacggctctctatcactttttccacgtcattcgaactcatcgagatacatgcggtcaagcaaacgacgcctccacataaaaaactagctaaattattcttggatattctcattttcatcttgaattgttttaggtctaagaatgtttatatcgcctttttccttgtacttaatgccatcggaaccttcggcttctatcacataaaaatacacacccggctgaacgtatttaccgcccttctttccatcccatccttgggccggatctgtccagtaatacatctgtaggccccagcgattaaatatccatgccttaaatttcaccaacgacttataggcaacccggaactcatcattaattccgggcgtggtacccggggagaatgcgttcggtatcatcagataagactccgagatatcaatctgaacctcatcttccgtgctgcaagtagtgctttggtcgcttacttccaacttgatgataaaagtcccggattggttgaacgtataatccacctcctcacccgtaaaacgaacaaccggattatcttcttccccttgccgatagattttccaattaaacagggcggctgtcggcgtattcgcgatagccgagaattgaacagtggcgggagcgcaataaccgctcttcgtcgtattcatattcggggcctcttgctcaatcagcaacgtgtctatatgagcatctaccgcagcggcctgatattcatcgatacaaagcgtaacctcctttccaaaatgacgagcgaaataatcgcctttcacacagatctccgtatcacaccaaggagcgggaatggatttaccgaacaaattgccctcgatgaccgccgtctcttgtttagaggtatattcttttttatccgaattatattccaatgtactataaataacatcaaattggcgagacagttcacgtcttgttcccgtattcggccaataataataaataggttggatcgtacctgtcccagccaagaccaatccgctacatggatcgctattatcggagacatgcaggttggatatgtttaaggtgtatttgctgtaatcaacgatccagacgtaacgagatacggctccttcctcgacaaaatagccatatccctcctctacattccgaatggtggaagtagttccattttgggtggaggccaccttctcggcctccaatcgcttggttttataacgataccattgatgcgaagaagaagaggatgaggtataactaatcgtcacgttatccattccatacaccaagtagacctcaagtcgctcggcggaatcgccggaactctgcgtggctttcatcggactaccacttcctcccgtcaccacatactgggcacacgagacagccgctacaaacacaaaacttagcgataacagtatctttcttaattccttctttagcatatatagtctaaaaattacggttccaaaattagggaaataaaaggacatacgtagcatgataagcaaaattcactatctttgtcacaaaatactccgaacagcaaatgaacaagattagtatatacgcattgacgttctttttaagtttatcgagcgtaaccgtttattcccaaaagaataataagcaagttatttttactaacgaacaagggagcgatatattttatcataccatcgaacgcggacaaaccgtatacgccatagcgaccatgtatggcgtaagcgtagaggatatttatcggttgaatccggaaagtaaagaagggatcaaggccggttctacgttaagaatcccgcagaaggactccgctatcgcaccttccggcaaagcagataactatacataccatacgatccagccgaaagagaccttgtactctttatccattaaatattcagtgcccgctacggatattatcgccgccaatccgggtctctccacatcgacctttacgattggtaagaatatccggatcccgccgacacgactggagaccttgcctactacggaaaaaaagaccgtacagaaggaaatggaatataccatacagaaaaaagagaccatgtaccgtatctgccggaagttcgatatttccagcgtggagcttttaagactcaaccccgagctgaaaaacggagtgaaagcgggcatggttatcaagataccggtagccagtgaagaagtgatcacccaaaacataagacagccggaagagcgtgaggtgaacgccctcctctctactcctaaagatataaagaaggtgaaccgtatccaagtcgccttattgttgccgttcatgacgaacgagacaacgcaatcatccgcaacctcccgtttcgtggaatattacgagggattgctattggcggttgacagcttgcgaaatatgggaacctctatcgagctatcggtatatgatactggaaacggtacgaagaaagtcaaggagatattgaaagaagatgcgttatcaaacgctaatttgatcattggtgccgtacagaatgaccaaatcggattgatcgcagatttcgctcaaaagcacaatatcaaatacgtgatccctttcacctccaagaatgatgatgtcttgtcaaacgcaaatgtttatcaagtaaacacgcctcattcctacttatactccaaggcggcgcaagccggatgcgatttattctcggattacaatatcatacttgtcaatataaaggataaagaagaaaagccggaatttatcaaagccttcaaaacggagatgcagcaacgcgatatcccgtttaaggaagtaacttataaaggggacactttcgccacggatatagaggcagccatggtaagggacaagcggaatgtggtattgccaacctccgcctccttagatgcggtgaataagatcaaggcaccgctccgtatgctttccgagttgaaagaggaggagaaagagccttatatggtcaacctattcggttatccggaatggcagacctatacaagagagtgtctggaggacttctacgcattgaacacctatatctatagtaatttctatgcggacaacttatctccggaagtccatagcttttattccgattataaaaactggtatagcaagaatttaatcaacacattcccgaaatatggaatcctaggctttgacacgggtatgtatttcctaggtgccatcaataaatatggctcgaacttcgagaataatctagacaagatccattataagagcatccagaccggattcgatttccatagagtgaataattggggcggttttatcaatacgaacttgtttattgtacattacaagaatgattatacggtaacccgcagtgaggtaagataattgatatgatgacgaaaaagatatttgtagcgatatttctgtgcatggcaagcttatcgatttgccatgcgcagaaaagtacttttaagcaagagcttgcggttggagcgtccttcggattaaatttctctagcgtaagttttgccccaaaagtccctacgaagatgaaacttgggtttaacgggggagcgacgatacgttggaatacggaacccaatttaggcatacaggcggaattgaactttacccaacatggatgggaagagaagtttgaggagaaacctcaatataaatatagccgtacggtaaactatatggagcttccgttcttgactcacatccatttcggaagcaagcgagtgcgtgtattcgtcaatctagggcctaaaatcggttatgcgctgagcgaaagcacggagtcgaaccttaatggcgagaacccgaacgcgaaccgtccggacgaacaacatacattggaagtccaaaagaagttcgattgggggctttgcggcggaccgggaatcgagctccgcaccggaataggctctttcctgttggaaggtcgttattactatgcgctgggcgatatgttcaatagccgtaaaggagacacattctctaaatcttccagccaaataatatccgcgaaactaacctatctgattcccatctttagcaaataaaggggatgggcccgtgataatatcgtaacaaccaatcgtaagatctgtgccgcaagtaatcccactcaagggataagaacggtggatagtatagccaatctccggacgatctgatcttttcacaccagtgaagagatcatttcacgctcgtgatacgatcgtttcacccttgtgaaaagatcatttcacatccgtgaaatgatctttggatacaggcgtacaagctacttccgataatacctttatccaacaggaaggttctacagtaataaatcatgaatacaatggggaacgcatctaactatcattattgttgaggtgacctactataaaagaaaaggccatccgtcacggacagccaatctcattgttaaccttaaatctaataccatgaaaaacacagtgcaaatatagagactttatgttatgcagcataattttccaacaagaaaagctcacctattaaccttatttaagacaaacatgctatacaacatagaattcagctctttttatctcgttttttctattaatagcgaaatactaccactataaatatttagtacctttgcatttataaacataaatatggattaatataagaaatcatgctaattataggtatagcgggcgggactggttccgggaaaactacggtggtaaaaaagatcatagaaagtttacctaccggcgaggtcgtattactccctcaagattcttattacaaagataacagtcatgtgccggtagagaagcgtcaatacattaatttcgaccatcccgacgcatttgattggccgctcctctctgagcaagtcaccttgctgaaagaggggaaatgcatcgagcagccgacttattcttatcttacctgctgccgattgcccgagaccattcatatcgagcctcgtgatgttgtcatcatcgaagggatcctcgctttatgcgaccctcaattacgagacttgatggacttgaaagtatttgtcgatacagattcggacgaacgtcttatccgtgtgatccaacgggatatgatcgagagaggacgcacggcggaagcggtaatggaacgctatacccgggtactaaagcctatgcacctgcaatttatagagcctagcaaacgatatgccgacctaattatacccgaaggaggaagcaaccagatcgccatcaatatattgaaaatgtttatcgagaacaatctggggcttccccatacagataatcaataaaccaatcgttccgacaaggatctccccaatataaatgcgtgtaccccgccaatacgttcttgtagcgatatagcggggtatccgtttgacctcctttcgccgtaaaggctttcgctaccgaaggcagcggactttccataggcacgatccgggaataatggaactcatgccctcgtaagacatcattcttatagcataaagtccgataccctaaacgtaacttcatgttctccatcgtggcggattgcggtaatacaccggccattggataggcattcccatccgtaccgataatctctttacagagatacatcatccccccacattccgccagcaacttgccccccacttccacaaaggaatgaatcgattcacgcatcccggaattcatgctcaactccgataaatacaactcgggatatccacccggcaaatagacaaaatcggcctccggtaaacaatcatccctcaatggactgaaataggtaatcttgcctagagtagataaaaaatgtatattttcctcatatgagaaattaaaagcgggatcacgggcgatggctatatttaagtttgcctttgaaacagtcctcatgacttccttaacccgaggaactggctgtcgctctggcaaagccgtgattgccaacaggcggtctatatccacatgctcctccaccaagcaagcaacccggtccgcaaactcctcaaagcaaaaatcctcatccaacgacaaccccaaatgccggctcgggatctctacatccgcacacttcggtagatagcctaacgcttccacacccgcatcctcacacgcttgtctcaagaaagaataatgactctccgacgccacgaaattaaataccgcccccacgacattcagatctttccgaaaattccggaagccataaagcaagggagctaccgaataagccgtacttttagcgttcaccaccaatacgatcggtatccgcaataaaccggagatctccgcactactccctcgcatggcatcgtagccatcgaacagccccatcaccccttcggtcacggctacatccgcattcgaggtataccgggcatataaatccttgatatgcccttccgacatcatgaaaccatccaaattcacggaagcgcaaccagccgccattttatgatgacgagtatctatataatccggcccacacttaaaaggctgcacccgtaaagaacgatttctcaaggcacgaagcaatcctaaggtaaaagtagtcttcccgcttcccgacgaagcggcacctattagcaaatgagatctcatgtattctgtttctaatatatctgggaaacaaagatatgaaaccaactcgtaaatgtaacatagaaataacataaattcttgttatactataaatcgatcctattatattcgctgcatgaaacaaaaagaataagtagttagtgaaaacaagattaaccatattatatagtatttgttgcatatcaatgtttcagggcacgactttttcccaaacaagcgcttttacccaccggaacgacagttccaatctagcgcctttatctacttggggaagaatccaaagacaaaccgacaagataattaccagcaatgttttccaaatgacctatatcggggtaccgttgatcgttagcggtttgattatcaagaatgaggacgatcattttcagagtttgcgcaatacatatattccaaatttccgataccattacgacgattacctgcaatatctacctgccgtagcgatgcttggcttaaaaataggcggtgtacaaggaagaagctcttggtcccgaatgctcgtatccgaagccatcaccgccagtatcatgggagcgaccatcaatacggtgaaacatacggcaaatgtcacccgtccggatggttcgaacaatcattctttcccttccgggcacacggccatggcatttatggccgccaccatgttgcataaagaatacgggacgacccgtagtccttggtatagtataggaggctatacggtagcgaccgccacggccgtatcccgtatgctcaataacaagcactggctatcggatgtaatggttggtgccggaatcgggatcttatcgaccgaggtcggatattttctaacggatctgatcttcaaggacaaaggtatcacccatagctatctgggattcgagacattcaattaccagcgaaatccctcttttttcggaatctatatggggtttagcttgatgccgacaaagtttaatctggctccggatgtgcgattaaaagcatcgccgggaagtacggccggatttgaaggcgcttggttcatgaatcgttatataggcttcggcggacgcatctcggcgacaagcatgcctttatcccttacgaaacccttagcgaatccgacagttcccggtacgacctatcaagtgaacgccctaaaatccgatcctctcgacatgatcggcggatacatcggctcctacctatcgtatccggtgaccaatcgatttctcttgggcacgaaactgctaatcggatgtaattacagcccagcctcccgaatatcagcattgggcgtggaggaaggcaaaccggaaacgattgagaaagagatcgtaaacacgaataaagcgtttaatataggatatagcacaaacgcctctttctcatacatattgcatcctaatctaaatgtgcgggtatttctcgattatacttttatcccctcacgattcgtatcatacatagccaaccccaaaaaagaaaccgatcgcttcgagcatcataagaccttacaggccttgacgctcggagcatcggtaaatatcatgctttggtagatttaaaaatcaatattgctccttctcgttcgggaagtcttgagatttcacgtcctcgatgtacgcttgtacggcacgggtaatctcctcccctaaattagcgtagcgacgtaagaaacggggagaaaagccttgattgataccgagcatatcatgcataaccaacacttgaccatctacgcctccaccggcgccaatgccgataaccgggatcgtaagctccgaagcgacacgagctgccaactccgccgggatcttctccagcaccaaggcgaaacaacctatctcctctagcaaatgggcatcctcgatcagtttattagcctcggcctcttcacgggcacgtaccgtatacgtaccgaatttattgatcgattgcggcgtcaatcctaaatgtcccataattggaataccggcacacaagatacgttcgatagattcccgaacctcagccccgccttccaacttgatacaatcggcatgcgtctctttcatcacccggatagcggaggccaaggcttctttagagtttccttggtacgtaccgaaaggcaggtctaccaccaccagcgcacgattcaccgctttcatgaccgatttaccatggtaaatcatctggtcgagcgtaatcggcaaagtggtcacgtttccagccattacgttagaagcggagtctcccaccaagatcacatccattcctgcttgatcgatcaatttcgccatcgaataatcataggcggtaagcatggatattttctcgccacgctgcttcatctctatcaagcgatgtgtggtcacctttctattatcatctacttttgcgacagacatattatatttttattaattgtttcggccgcaaaggtaagtattattatttattttcaagacaaacattcacggcacttaagcctctgtcgccacgttcaaggtcgaacgtcacgatatcgttcacggagatatcatccacaacattgttcacgtgaaagaaatacttttccgtccccgacaagtcacggataaacccgaacccttttgcctcattaaaatagtctaccctgccccttaagataacgggagccacatcctctttcttaggagtcgagatcaagatatcttcctgatttatctcttctttttgacgaagttcgggagggacagaggtgatcatcccattttcatccacataagcgatcatgtcctcaaagctagtcgccttgccggacgattttctttcctctttcctgttctgtttctctactcggcgggcttgtttctttttctcgttttcacgtttaccaaatgatgcgtattttgccatacagtcgattttaatttatactagggcctcacgttccgtgaagcgttgtttatactaacttagcgtgagaattgatgattaaaggagagatccgcttaataataatataaaaagaagaactatgtcgataatgattctagactcaaactttcgcaaagataataaaataaacggagaaaaccttatagatcctctcatttaagaataaaaaaacttacttttgcatcctataccaaaaagcatttatgaaactacttttttttgatttagagactaccggcataaaatactggagaaatggcgtccaccaaataagtggggagatcgtaattgatggggttacgaaggaatcttttaatttcaatgtctgcccacatccccaatgtgagatagaggaagaagcgcttcgcatttgcaacgtgtccaaggaacagatacaagcttatcctcccatgcgagaggtgtacgttaaattcgtgaacatgctgtccaaatacgtggacaagtttgataaaaaagacaagttctttctcgtaggatacaacaacgcctctttcgataatcacttcttgaaagccttcttcgtacagaacggagatcattatttctactcatggttctgggtgaactcgatcgacgtaatggtattgtctacccagcatttgatgcgcaaacggcatgagatgacagatttcaagcaggaaacagtggcaagggctttaggcatacaaatagattccgctaaattgcatgacgcatcctatgatattcaattaaccaaagaaatttataataggatatcctccctctcatttatgggttgattgattctttttataaattatcatttttgactataggttgatttaattatctttacggcgtagaatcaatttttaagatgtctgtgaaacatagtatccgtattttcttcatctttattatcgctctcgtatatacaggttccttgactgcccaagaaaaggcgtatccgaaaaacggagagggcatcactctttttctcaaacgcttcaaccgtaccggcgggacgtatcagaaagagtttatcgagcttaataaagggaagttgggtaaaaataacactctgcgcatgggcgtaaaatataccttgcctccgctcgcctccgcccctcagaagaagaattatcagcccctattcggcaagtcgctagccagttacaaaataacctcttccgatttaaagggagcttgcttttatctggtcagcggtcatggcggtccggaccccggagcgatcggtaaaatgggctcccatgaattgcatgaggatgaatacgcttacgacatcatgctacgtctggcacgcaatcttttaatgcgaggcgcaaaggtacatattatcatccaagacgcaaaggacggaatacgtgaccagcaattcctcaataacagcaaacgggaaacttgtatgggtagtccgatccccctcagccaagtaagccgtctggatcagcgttgcgccaagataaacagcttgagccggaaagataaagaaacttataagagagcgatattcatccatgtggacagccggagccggcatcaaaggaccgatgtctttttctatcataagcccaaggatcaagcgagcaagcgcttggctaaaacgatgaaatccactttctcgcgcaaatacaaccgccaccagccgggccggggattctcgggcacggtagacgatcgtaacttatatgtattacgtcacacgaccccgacctccgtattcgtcgaattgggcaacatacaaaaccaatacgaccaacaacggatcatcctcagcaacaatcggcaagccttggccaactggctttgcgagggttttgtcacggattataattattataggaagtagcatccctaatgatctattatactaacacatatcctgcggcagaaatgttatatgagcgatcttaacagcaatgtaacatatatttcatttctccgaaataagaatatccgttctttgccaaaaataattatatttgtatatggagagccgtaaggcactctttaaaaaacagaacagcttatggcaacaactcgtattcttgtagtggatgatgaagaggatttgtgtgagatccttaaattcaacttagaaatagaaggttatgaagtagataccgcctatagtgcggaagaggcattgaaaaaggatctgaccgtttacaatttattattgttggatgtcatgatgggagaaatctccggtttcaagatggcacgtatcctgcgacaagatgagaagacggctaatacccctatcatcttcctcacggccaaagatacggagaacgatatgctcacagggttcaatctcggggcggacgactatatctccaagcctttctccatccgccaagtgatagcgcgtgttaaggccgtactaagaagaacttccgagaaatcaaaagaaaaagagattgagaaactcgagtatgagacattagctcttgatacgaaacgcatcaaggctacggtagacggggtggaagttccattgaccaaaaaagagtttgagatactaaaacttctattggaaaataaagggaacgtcttctccagagaggaaatactgtctcgcatctggaaagacgaggtatatgttctagaccgtaccatcgatgtcaacatcacccggttacgtaagaaaataggtccttatggaaagaacatcgtaactcgcttaggtttcggttattgttttgaatgctaatattgtcgctgaatcatggtaaagatagatggtgagaaaagacaccggataccgtttagccaacggcttttctggtcggtcttttttatgttcttgggctttacggtctgtttcctgctattccaatatcagcgggaaagggagttcgcgcaagaaaagttgaacaatgtgttgagtaactataattaccaattattccgcaaatgccaacaaagtacggacatcaaccagaccgtaataagtttcatggacgacatccctcaaaaggatttgcgggtaaccattatagatccgtccggcgacgtattatttgataatagcgggacggatgagttcaataatcataacgatcgaagcgaggtacgcaaagcccgattatataatgaagggttcgctatccgttcctcggaatctacgggaaaaaggtatttctattcggcatcgaatataggaggttatatttaccgctcagccctgccctatgatccatatgtaagagggatattgacggtaaacaaggacttcatttatttcatggcattgatgaccttgattttcttctttgtcctttcccgttttactttcagcataggtaaaacgatatccaaactaagggatttcgccttaaacgtagagaaagatcgaatgcctgcggtcgattatgttttcccgaatgatgagctaggtgacatctcacagaatatcgtaaccttataccatcggcagcagaaagcgaaaaacgagttatccatggagcgggaaaagcttatcaaacatttccaatattccaaggaaggcttcgccatgtttacaagtgaagggcgggagattctttctaacatcctattcattcaattcataaatgtcatatccgacacccagatccaccaagtggaagacgttactgatatagccgaattagaaccaatccgtaccttcttgaataagaatatccggaatctgaatcggaaaaagaaagtattaagagagtccgtgactattgacaagaacggtaaaatattcttgatcgaatgtattttattcctcgataatagttatgagatctctattaatgatatatcccgtcaagaagaagaaagccggatgaaacgacagcttacgcagaacgtctctcacgagctgaaaacaccggtcagcagcattcaagggtatttggaaacaatcctatccaacccagatttgagtccggacaaacgtcaatttttcttggaacgttgttattcccaaagtacccgccttacaggattattacgagatatttccgtattaaacagacttgacgaggcatccgagatgttcgacctcacggaagtaaatatcacgaagcttatcgccgagatacaaaaagaatgctcccaagatatggaagaaaaacacatcacgtcggaaattatcctcccgggagatccgaccgtgttcgggaataactccctactctattccatattccggaatctatatgacaacgcgatcgcttatgcgggagaaaacataaagattaccgtcaactgctataaagaagatcctaaatattattactttagcttctccgataatggagtgggtatcccggaagaacatatcaatcgcatattcgagcgcttctaccgggtagacaagggacgcagtcgtaagatcggaggaaccggattaggattatctatcgttaaaaacggggttaattttcataaaggacaaatatcggcgaagagcagtccgggaaaaggggttacttttttcttcactttgaaaaagaaactataaggcagacctcgaaaattccataacatacgcttgatatttaatattaaaatgtatttttgtattgaacatcatacaatatcatgagaaatacctatttagtattatttatctatttaatgatcccaatgttttctttagcggaaaacacctatactacccaacaaagggaagatagtcttttatccctattaaagtcctcgccaaccgtagatgaacagatcgagttatataaagatttagcgacaatgtacaggcaagcgcccaaggagattgtttacctaaacaaaatggcggatgtggcaagctccacttcgaaaggtcatgcttctttatattacgcatgggccaacttatcccgccattattacaatatacaaaacagggatagcctgatttactggtcgcataagatagattcattggccgcggccaagaatgaggttccagacgcattattcgatgcacgaggattcatttgccaaatggatctatgggatggcaattatgagttagcgatgaacggggcgatcagcctatacaactatgcccgtgatacaaaaagtgaatatggattgatttgctgcaatgagaacctaggtttaatctatcaagagatacatcgggatagtgatgcgatagtagcctatcgggaaggtctcgatttattacagaaacgaggtgacaatccgaaattcgagatgcaatacatggcaaacctcattgaatcttatcttcgaaccgaccatttcaccgaagccaaggaattattaactcgttacgatgaaatgatccaagatagggaaagagagaatgaagaacaaggaaccgctttccccgtggatcgttgccgtgcgttaatgtatgttttttatgcggatatgtatgtccttcaagacaagcccaaggagacattggacgccttgttgaaagcgacaccgatcgtaaagaaaaccggagatgattatacgaaattctgttataactttgtttccgccaagtattactatttaataggtatgtatgaaagggcgctgaatatcatagataaaaataaattaacagaagaagatatacgaacatcggaactgaaagtcgagatactcgaagcattgggacgttataaagaagcgctcgcatttagtagagaagttgtagaacataccaagatgttgcatgacgaggccttcaaccggcagatcaatcagctccggacattacatgatctaaacaatcaagagatgcaggcatatgaactacagctacgtgaacaacaactgcatacccaaaggttgttaatgattattctactcgtagtatcgatcgtccttttagtgatgctatacatcgtatacaagtcctatcgctccgcacgccgctaccaacgagaacttatgaaagacaaggaagccttagtagagtccgagcgtcaacttcgtacagccaaagagatagcggaacacgccaaccagatgaaaagcacgtttatcgccaatatcagccatgagatccgtacgccacttaacgcgattgtcggcttttcggaattaatatccgatgaatctatttccgctggcgaaaagaaagagtttttctccattatcaacaataactcttatttattacttaatctgataaatgacattcttgacctttctcgcctagaatccgggaatatgaagttcattatagagaagacaagcttatcggattgttgccggaacgctttggcaagtgtagagcaccgggtcttcccgggtgttcaattgacctatacaccttctgaagaccccttacatatccagacagattcgatacgtctccaacaattattgataaacttattgaccaatgcctgcaagttcacgaaagaaggagagatcaacctatcttatcaaatagatgaggacaagcagcatgtacgtatcaccgtaaccgatactggatgtggaataccggaggataagcagaaagccatattcgagcgtttcgaaaaggtagatgaatatgcacagggtacaggcttagggttatccatcagccaaacaattatcgagcatttaggtggctccattcaattagacccgacgtataagcatggagcccggttcatcgtactccatccctacaacccttttgataatccatcatgacgtaaaccacgtcttgaaatccggcactctcgccttgctaaccaatatacggtccaaggtcggtacgatcaaattgatcgcaaggcgtccgttaaaccagagatcgatatcttgcaccgcctttctggatatcaagtactgacgattgatccggaagaacaaggcgggatcaaggctatcggcgagctcatccaaggtctgcgtgaaaaggtattctttcccgtccgtcatcaccgcctttacatttccgtccgctatatagaaaaataagatcatatccacggaaacaggtagcagcttatcccctttcatagggatcaagaaatgcgttttatgtccttccacccgcttcaaggcttgcatgacagcggaataatcgatcgcttctttctccacagccgtcgattgtaaccgtgacagcttatccaaagctttccgtatatcatccgcatcgatcggtttcagcagataatctacgctattcactttaaacgctttcagcgcatattcatcataggctgtcgtgaaaatgaccgggcaagagatatctacatggccgaagatctcgaaagccgagccatccgccaaatggatatccagaaagataagttccggcattggacgcgattgaaaccattcgacactatccgtaatactatctaggacatcgatcacctcgatatccggatcaacctctcccagcaatgccatcaaattacggacagccgctttctcgtcttctattatcaaagctttcataccaaagggattgttacgctgaatatactagcatcttcttttatggaaatatctttcttatacaagaggttataacgtttactcaggttcaccaagccaataccggtgcctccgctatgtgtcaatttcggttggataggattgctaaccgtcaaggaatcatggtccgaacgaacggaaatggtcaatgaatgacggttgctaatctcgttatgcttcacggcgttctcgatcaaaagctgcaccgacataggaggcagttgcttagactcgtgctccttccctaagtctatatcgaagactagattatcctcatagcgcattttcaaaaggaagatataagcattcacgaaatccatctcctcccgtaaagtaacactacggcactcattctcttgcaaggtataacgtaagacacgggataactcctgcaaatattcttgtgccttcccgggagtctcccggatcaaggaacggagcgtattcaaggaattaaataacatatgaggattaagctgactcttcaacgcctcatattggttcaatagattctccgcccgcaattgctggttctcgacctgtacttgctggctttgacgaatcaggtaaatcatatagcaactccccgtaacgacacacgacatgataaaatccctcaacggatgcagataatgatgtaccaaggcgtcgatcgccggaatatcaaactgatggtgcaagaacacgaaaccttttcctaataaattattcacgcaccaagtcattacgaacgagagaaggaccttctgccaagagatacgcgctttctgccgattgaaaccaaagacatacgtgttcatcgcaaatagcagtaagagggacacgaaggtgaaaaagacctcattcgctacatccaataccgacatatccgggaaaagagcgttctgcccggtaacgtcaaacaacgacaccaattccgggaaatggatcaagaaggccaccatgatcgatatgatgaccaacgagaacacatatttattctttatattcattttcttcatgaagacaaagatagtcatttcttctctacccgtgcggaaacatacataccgggacgaaaacggggattcgtctctttcacccgagcgtacatttccaaggaacggctcgtctcgtccacctcctgtccgatcgagaccaagaccgcatggaaggtctccttccccattccattcacccggaactgtacttggttcccaatggataagtccgctaaatccttctcataagcggtcaggcaaaggagagtctcgcctttatcgatcacatcacagatcggttcgcctgcgttcacgtatttaccgagattaatggacagcccggcgacataaccgctcagtggcgcttttacctccaaataaggttggataccgtcttccagaagatcgccggcggagacacctaggatagcaagttgcgcggcggcggcatcttgacggctcttcatggaaagataatccgccttgctttgctggaaacgtttttgcgaggccgcttcttgctcgctcaaacgctgttgccttttatactcagcctctaagtattccgtttgggcatgggcatccaaataggtctgttgcaatgtgataaaatccggattctccaagctgacgatcaccgagcccttcttcacataatcgcccggaagcagcgtagtagcatgaaccgtgcctcccatcgtcaacgtaaccgtagcctgccgctgcgggggaactaccataatcccgttgaaagaggagtgattcggaagggccgttgccgaggaaatcccatccacctctacgctatccacggatggttcggacggtacgttttctgctacttgagtaatagcgggccgggcagttatgtcttgcgaatcgccctgtcctttctccgcgttgtttgtcatactgcatgcggccaatgccataagagccgcaggaatccatatctttttcatcttatattatttttctggttatctactatacaactccaactcaagcgccgatatattataggcatatacggcctcgatatatccccgccggatctcccgggcggcgttcaggctttgaacaaactgcgtgatatctgtctcgctctctttgaactgtaccgtcgcgctcttcaacaaagcatccgcttccggtaaagcgccggtcgtataatagcggatatgctctccttccttacgaagcgcaacgctcaactcctccaccttattgttcaactgacggatgttgctctccgcttccgtgcgggcgatataggaatcgatcttcgcttgccttacccggctatgctgcgggaagaacaataccgggaacgagatcccgaccatccaagagtccagaccgctcaacggggctattttctgacgcacatatcctaccgatagttccgggaagaaacggcttcgttcgatacgaagcatggctttcttctcatcggccacgctccggaagtaattcagatggatatcggacggagcgatctcggctacgcgagcggggaataaaaccaatgtcgtatccataggcagcaatggggaatccgaataacaagtccatgagaaacgacgggcagccaattgcaactcctcctccgcctgcgacaaacgggtttgcagatcggcgaccaaggtagatgacatattccgctccaatagcgtgatatccccttgctcataacgcaactgacttgcctttcgcaaacgtccggcccactcgatctgctctttatacaaggcacatagatgaaaggcatattgataataagcccatgcccgttttacctcggccgtaatctccttcttcaccaagtctcggtaatattctcccgtggcgacttgacggttcaccaaggcgttcttataaaatggggtcaatagagagcctaaggattgcgtgatctccatctgattgtcgtttcgtgtctcaccgttgatctgtccccatgaataattaaaggtggtcggtgacacctcccagctctctccccgtgaagcacgactacgttcaatggatgccgtggcagtcttcaggcgaggatgattctccaaggcgatcgtcacggcttcttccaacgacaccgtctgttgggcatgcgtggggaataagatacctaaaaaaagaagaaacggcaataggcgcttcaaccagtgttggcgcttccaagcggccgagctatttaccaaccgataaaataccgggataataatcaacgtcaagatcgtggagacaatcaagcctccgatcacgaccgtcgctaacggacgttgcacctccgcgcccgcggacttcgctatcgccatcggcacgaatcctagagaagctaccaagccggtcaagaatacggggcgaagtagatgcggacatcctttcgcgaggatacgattcgttgtcatttgatatttagtttgtttccgtaagttattaaaatgattaatcattaatataccattcaagaccgctacgccaaacaaggcgataaagccgacccccgccgatatactgaaaggcaaccctcgtaaccaaagggccagaataccccctatcaaggataacgggacggtagaaaataccaccagcgagtaggtaacactcttaaaggcaaagaacaatagcaataagatcaatgacaaggcgaccggtatcacgatcgtaagcgtatcgatcgcattccgcaagttctcgaactggccgccatactcaaagtagtatcccggttccagcttgatatgcttgtcaagggtttcttggatagtacgcacgactttctggatatcagcgtcacggacattcaccccgatcacgatacggcgtttcgtggcatcccggttaatctgtagaggcccgttgaccagctcgatcgtagcgacctcgctaaccggtatctggattccctcggcagtccgtacaaagagcttatccaaattcagatccgccactttatcattatccagacgaagcaccaagtcgaaacgtcgctcattctcgaaaacgacacccgccgcctctcccgcataagccgtacggatgatcgtgttcaactcctctatattcatcccgtaacgggcgatcttggcacggtcgtagtgtacgaccaattgcggcagccccatcgcctgctccacgatcacatcggcggctcccggtacttgctccacgaaaagagaagcttccttcgccttcttataaagctccgccatatcctctccatatagcttgatcgcgatatccgccttggctcccgtcatcaattcattgaagcgaagctggatcggctggctgaaattaaactccgcccccgtaatcggttccaaggaagccttcatcttctccaccatctccgcacggctggaggccgaggtccattccttgaaaggtttcatcacgatcatgatatccgcgtcttccaccgccatcgggtcggtcggaacctcggccgttccgatcttggctaccacgtgtttgatctccgggaaactcttcatcaaggtctcttccgcttgcttcgatagctcgatactatgcgtcagggaactaccggcgggaagcgtcatctgcatggcgaaatccccctcatccagcgtagggataaactccgcccctaacctcgtgaataagaaaagggacacagccagagccgcgaaagaacaagcgatcgttccccagatatgacgcagacagaaatgaagcgtacgcctgtaaaccccgtttaatttcccgaagaaacgatcggcgaatgtaggcttcgaagagatcgtacgctttaggaacagggaggccatcatcggcacgtaggtgagcgaaaggatcaaagccccgataatacaaaataccaaggtcttcgccatgggggtaaaatacttgccctctatcccggtcagcgtaagtagcgggaagaagacgatcaaaatgatcaatacggcaaaggtagcgctccgggcgacatgaccggctccggcctcaacctcccggtccatctcctcggcagagagcgtacgccccatcaaccgcctcgaatagatatgcgccaacatcccctccaatataacgatcgatccatcgaccacgataccgaaatcgatggcccccaaactcatcaggttggcggagaccccgaaaacacgcatcaagataaaagcgaaaagcatcgccaacgggatcacggaagccacgatcaaaccggcccgcacattccccaagaagatgatcaatacgataaagacgatcaacgctccctctatcaagttacggatcacggtggatatatttcggtctaccaattcggaacgattcaaataaggttctacacgaacaccttccggcaacattttctgtaccctttcgacccgtgcctccagttccttggtcacgacattggcgttcgcacccttcaacatcatggcgataccgcccacgcactctccctcgccatcctttgtcatggctccaaaacgcttggcggaaccaaagcgaaccgaaccgacatcgcttatatgaatcggtatccctccacggttcgtaatcacaatgcgctcgatgtcctttatcttgccgatcattccctcgctacggatgtaataagccttattgattttctcgatataactgccgcctgtattctggttattccggttgagtgcctcaaacacctcgccgatcgtaatattcaaggaataaagggcatccggatctaccgccacctcatactgtttcagatagccgccaaagctattgatctccacgatacccggtataccgctcagttgccgtttcacgatccagtcctgaatggtacggagttccatggcgtcgtatttctcctcataaccgggctccacgctcaatacatattgataaatctcgcccaagccggtcgtgataggcatcagctccggcgtacccagttccgtggggatttctcccgccacggtctgtatctgctcgtttataagttggcgggcatccaaggtaggcacgctttccttaaacacgaccgttaccaatgacaggccaaagcgggaaacggagcggatctcttccacgttcatgatattactcatcgctatctcgataggcatggtgatcaattgctctacctcttgcggggccaaggttggcgataccgtcacgatttgcacttgattgttcgttatatccggtacggcatctatcggtaaagtcatcatggcatagattccccccagaagcagaaacaaggttgtcaacccaacgaatagtttcttctgaatagaaaaatggacaatcgctttaaacatcacttcatttatttaatataatagttacaaaaataaaaggtaagcgtttgtctgccccgtataaaataatgaagtgaccgaaatcaaggttgaagtatcggtatgaggagttggagcatatcaatagaaaaaggcttcacatgccctctatgacacatgaagccccttttgttatcctatataaataataagaatcgttgccgttaaaagcggatcagcacttaatgctcaactgtcgcaacacctcacggatcttctcatacgtgacgatacgtgtaggaaccaaaggcaaacgaagcttattctcgataaagcccatcatattcagcatactcttcgctccggcaggatttccatccacgaacaacaggctgaacagctccgtgaagctgtgatggatcgtacgtgcgctatcataatcacccgccaaggccagacgtaccatacggctaaactcacgagggaaggcgttaccgatcacggagatcactcccaccgcacctaatgtcattaaagggaaagtaataccatcgtcaccggagatcacgttgaaacgggccggcttgttcttgatgatatcatccatctgggtgatattgccggaagcctctttcacggcgatcacgttatcgaactcacgggcgatgcgaagcgtagtctcagccgtcatgttcacgcccgtacgccccggtacgttatagagtacgatcggtaaatgggtagcgttggcgatcgccttgtaatgctggtaaatcccttcttgggaaggcttattataataaggtacgaccgagaggatagcgtcgataccctcaaaattatctgtcttcaacttctcgacaaccgaccgtgtacaattacctcccacgcctaatacgatagggatacggccccgtacacgggtcactaccaagcttataatgtttttcttttcttcttccgtaagtgtaggggtttccgctgtagtacccagcactaccaaataatccgtaccgttctgcacctgataatccaccagcttgcctaacgcctcgtaatctacactctcatcttccttgaatggcgtgatcaacgccacacccattccttttaaatttatgtctgccatggggaaaatattcctttttgttatttagcactgcaaaaataaggaaattatatcatttagcacggatggaacgcaaataaaataatatctgtccgaataaatactgaatatcgtccttatctgttacagtcaagcctaagtcgtaccattcttggcccggatacttaatcccgaccttgaaggcggatggatgccggagagcgatgtattgcaaggcataacaacccggccgggtgatatcgatcaagatatccgccttgagagcgcccaccttttccaagacactatctgaagggaatccccacgcgttgagatcgttctttatatgtacaggaatattggaatcgtcgaaaggaatatccgctcctccggacggcacatacacacacgtcttgatatccttcttcgccttgcgcaaaggctccaaggccctcatgacgtcctcgtgatcctctatattatacaagaccaaaagcgaacgtgcctcatccaaggaaagggaacgacgcggacgccccccagcgtccgacactaaagcctgtatcttcttcttgataaaataattcgtaaacatttattccagcatatttaagaacgcatcctcgttgataatcttcacacccagcttcgccgctttctccagcttggccggtcccatattctcgccggcaaggatataatcggtcttccctgagacggagccgctattcttgccgccatgttgctcaatcatcgccttatactcgtcacgtgaatgcttggaaaatgtcccgctgatcacgatcgtcaatcctttcaacttctcggaacggttcgccaattgctcctcggaaaccgccatccgcaagccctgttcctttaatcggttcaccaacgtacggttcttctcgtccgagaaataactcaatacactctgggcgatccgctcgccgatctcgtccacggctaccaaatcctctaaggacgcctgctccaatgcctcgatcgaatggaaagccgagaccaagcgtttagcgaccgtctctcccacgaaacgaatccccagaccgaacaagactctctcaaaaggaacttgcttggattcctccagactcgacatcagattctgggcgctcttctccgcccaccgttccagacgcaataaatcggcaaccgtcaacgtatataagtccgccgagtcttttacataaccggcgttgtacaaatcctccaccgtttccgggcctatattgatattcatcgccttccgggtcacgaaatgctctatacgccccttgatctgaggaggacagcccgactcgttcggacagtaatgcgccgcctctccctccggacgtaccaaaggagtcccgcactccggacacacacggataaagcggaccttatcccccatcagcatcgaacgagcctccacgttcactcccacgatcttcgggatgatctccccgcctttctccacatacacttggtcgccgatatgcaagtcaagcccctcgataatatcggcattatgcaaggaagcccgcttcaccaccgtccccgccaacaatacgggctcgagattcgccaccggagtaaccgtccccgtccgtcccacttggaaagagaccgagttcaagcgagtctcggcacgctccgcctgaaacttataagcgatcgcccagcgagggcttttcgacgtaaaacctaagttcctctgctgacgaagcgagtttaccttcaacacgattccatccgtcgccacgggcaggttcttacgttccacatcccaataagcgatataatcgaatatatcctgtaggctctggcatttgcggatcacgtccggaatcttaaaaccccatgcgcgagccgcctgcaaattctcataatgcccttcggccggcaggttctcacccaataaataatagaaataagcatccagcttacgggaggccacgatagccgggttctgctgtttcaacgtaccggaagcggcattgcgaggattggcgaacaagggttcctcctgctcctcccgctccttattcaagcgatcgaactccgcccaaggcagcaatacctcgccacggatctcgaactcctccggaaaatcagagccccggagtcttaatggaaccgaacggatggtcttgatattcgccgtcacgtcatcaccacgagtaccgtcgccacgggtcacggcacgcgtcaagcgtcctttctcataggtcaaagagatagaagtgccatcatatttaagctccgccacaatctcgaaaggctcattcaaggagcggaccgtacgatcataaaaatctcggatctcatcctcggagtacgtattacccaacgaaagcatcggatatttatgtactacttgctcaaactctttcgagaggtcgctccccactcgccgagtcggggaatccggatcggcgaactcgggatgcgccgcctccagttcctgcaactctttcatcatcttatcaaactcaaagtctgatattgtcggtgccgaaagcacataataattataattatgccgctccagctcatcacgcagggcttttatctttgcttcgaccatattagtatattaattctacgttgtctatccaaaacgtatttcccggagagccgatataggcccctccgtggctggaggtgaactgcaacaccatatgcgtaggtgcctcgcccggctccgcccagcctacctcttggataggaacgctttttcctttactatttaacgtataacgttcctctacttgtatacgcatatacggtttatattcgggcttggatgttatatttccataaaggatcgggtaagtagcgtcatttacccaatcaggggtagattccgtatagcgttgcaccatcgtaccgacccgcttggaataaacattcccttcctcgtcttcccatcgtttctgcaacaacaagatcaccgccaaggaatcctgcccggccaccgtactcttacggctgaaccccgtactacgtacccgattcttctcgggagcggctttcaccttataatcaaaccgcaacgctttcggcttcttggagaaaggcactcctgattgtaacatcgcttgggggttctttgttcccttgatcggctcatgcaccgtacccaagaaaacggagccggcggcgatcacctcgatatccaccaaaccgaaaaccttcacgctctcataacgggtctccatgcgggcgcacatcccatccccccgtttctccgggaaaacagacgtattggttttcaccactcccgccactttcgccatcacgttggaagtagcccacggagaaccgcccatattacgaaacgccgtattaccgacaatcgtatccgagggccccagctcataaagccatttcgtatttcccccgataatgccagactcatgaatctcacggacaatccaattatccatgtctccataagcgaagggcaccacattctccgatgtcaccccatccccgtccgcgagaaccacggacaaaggcatacaagcgattgccaaaaataacgctttctttcttaaactcaaacccatccctctatcaatttaatacctatctaaccctttatttataagctatagccccattccttcaaggccatgccccaattttcctctacgagccggaccgtacgatcctcgtacttgtattggttcttcttgtagcccttcttcttgcccagatacttctctatatccgccttagactccttaaagccgggtaagtttaatgacccgtaaatattttccgtcatggcgaaagcgtctttctcgaaatcctcgaacttcacttccaccagattgccttccggtatcaggtgcttctcttcctcgtacttatagaaaagacggcgatatacctcgatgaagttcgcctcgatctgctcgttcgtgatatcctgcaaacgcaatggctggatcgtattcgtaaagaaactgcgggtactctcgaataccgtatacggatttcgcttcaagtagatgaacttagcgttcgggaacatctccagcaatgtcttcacacgccccgtatgcggtgggttcttgctcaaatactgcgtaccgttcgtattccagagggaaaccttaaccagacgcatgaaagtatccatgaagatccgccgctcctcctccgtgatatcgttaaacaataagtaacgatcgcaatactccatccagcgtttcgggaagaaccagaaattataatacgtataaggcatcatgttcgacaaggcgaactcctcctcttgcggaagatccaccttcaactccatattatcggtcggacgcttatccggcatcaagaaagccatgttcttcttgaagaaaggctgcccccagagcatcaggtgcgggaataccgtctggtacgtcgtggtataaccgaaatgcttatcgcaggcgaagatgttatgtacaaaggtcgtaccactccgccaatgccccaagataaacaaggggtccatctccagcggcttatcggccaatttcttgaaccggctatcctcgatcggcttcaaggcgctcaacaggcggcaaacaccggtcgtaaggcgatacttacccttaaagcccttgtctatctgctgccgggccgtcaccttcctgaacgtatcccaatccgccccgaccaacgtattgatcggtagcttatcaaactccaacaatcccatatcctatcgtttttccgttatacatttcacagatacgccctgccggcccaactcctcacaaaccttacggatcgcctcataatgctcctctccgattcccatctccgggaggttcaaggtagccaaagcgtcttccgtcaccatatctttagcgtccacacggtcgatgatcatacccacggcggacgtattattcgtaatcggatcgatcaagataaacgagccggtctgcttattcctcctatacggatcgaagaacaactccttgccggtagtaaataccacacggccgatctcgttcagctccagatgatccacggaagactgctccatcgtgttcacgttcaccttatagcggatactatccacacgggcacgtgtcgtatgagtggtctgcttgatgtagaactgcttgttcacgtccatggcttcctcatccatccacaccagcatggcctcgaaattacggtcgcggatcggcaagttatccgggtgcaccagcatctccccacgggagatatcgatctcgtcctccaaggtgatcgtaatacattgaggagggaaagcctgctccaactcaccctcgtaggtgacgatgctctttaccttcgaggtcttcccggaaggcaacgccatcaccgtatctcccttacgcacgataccgctggccaccttgccgctaaacccacggaaatccagattcgggcgcaacacgtattgcaccggataacggaagtcctcgtagttacgatccaagtcgataggcacgttctccagataatccaataaagacgtaccctcgtaccaaggcgtgcgatcactcttctccaccacgttatcgccatccaaggccgacaaggggatatacgtgatatccgggatatccagcggctccacgaaacgtttataatccgccacgatccggtcgaacgtatccttgtcgaagtccaccaagtccatcttattcacggccagcaccacatgcttgatccccagcaaagataccagataggtgtgacggcaggtttgcgtgatcacgcccgtacgggcatccaccaagatgatcgccagattcgccgtggaaccacccgtgatcatattccgggtgtactgctcgtgccccggggtgtcggcgatgatgaacttacggttgttcgtgctgaaataacggtaagccacatcgatcgtgataccttgctcacgctcggccttcaagccatccagcaacaaagcgtagtcgatatgctcgccggcgttgcccatacgcttgctgtcacgctccaaggcatccaactgatcctcgtatattttcttactatcaaacagcaatcggcctatcaaggtcgatttgccatcatccaccgagccggcggtcaagaatctcagcaggtccttctgctcgtccttatctaggaattcctttatatttaattttgtatctgccatgtctcttctgtgttaaaaatacccttcccgtttcttctgctccatactagcgtcttgatcgaagtcgatcacacgggtcgtacgctcgctcttcgtcgtggtcatcatctcctccacgattttctcgatcgtatccgcctcgctctccacggcgccggtcagcggccagcagcccaacgtacggaaacggaccatacgcatacggatctggtcccggtattgctccggcaagcggtcgtcgtccgccatgatcaaattaccgtcgatctccacgcacggacgctccttggcgaaatacaagggaacgatcgggatattctccagacggatatattgccagatatccagctccgtccagttcgatagcggaaatacacggatgctctcgcccttatgcacacgggcgttatagatatcccacaactccgggcgctggttcttcgggtcccattgatggaacttatcgcggaacgagaagatacgttccttcgcacggctcttctcctcgtcacggcgagcgccgccgaaagcggcgtcgaacttatatttatccaaggcatgaagcaaagcctgcgtcttcatcaagtccgtatgcaccttgcttccatgcgtgaacgggcccacgcccgcgtggaaagcctccatattagactccacgatcaagttccagccgaatttcttcgcgtaagaatcacggaactctatcatctccttaaacttccatttcgaatcgatgtgcatcaacgggaaaggaaccttacccggagcgaaagccttctcggccagacggaccatcacggaagaatccttcccgatggaataaagcataacaggattctcgaactcggcggctacctcacggatgatgtggatagactcggcctccagctcctgtaaatgacttaacttgtaatcagacatatcttttttcagtgtttaatttctactttcggtacgatcaactccaacaaccggttcacggattgctccacgctcaatacggaggtatccaaggacaggtccggacgctccggtgcctcgaacggggcggaaaccccggtaaactccttgatctcgcctttccgggccttggcatacaggcctttcacgtcacggcgttcgcactcggcgagcggcgtacttacgtaaacctccaagaaatccgctttaccgatgatagcggacgccatctctctcaactcgttgttcgggctgataaaagccgctatggttataacacccgtatcgacaaacagtttacccacctcggcgatccggcgtatattctccacccggtcctccggcgagaacccgagattattgttgataccactacggatattatccccgtcgaggatgcggcaaagcaatccccgtttatgcaactcacgctccaaagcgatagcgatcgtgcttttccccgagccactcaaacccgtgaaccacaccatcacgcccctttgccccaaaagcgcctctttatcctcacgacccagcatacggtcgaaaatcggatagatattattttctaaaacttccatatcataggtattacaaacacggagatcaagaacgtgatcaagttcaagggcaagcccaccttcacgaaatccgtgaacttatagcctcccacgccttgtacgatcaggttggtctggtagccgatcggcgtactgaaactagccgacgccgccatacagatcacgacaaagaatggggtcggatcaacgcctaattgcgtagctaccgacaaagcgatcgggaagctcaatgccgccgcagcgttattcgtgatcaactccgtaaatatattggtaataataaatagaatcgccagcaacgcatacggccccaaattgtcggccataccgattatatggcgggctatcatggaggcaaagccggaattctccatggccttgctgatagcgaaagcgcaagcgatcgttatcaagatatcccaagaaatgtatttcgtgtattttttaggcgggaaaagcttcgtccacgccatgatgattgtcgtaatacagacaaagaagaacatatccaagcgcatacttggaacggcctctttcacgactggcaactctcctaccgtcgcccccgtaatcataaagatcaacagtcctaaagccagccaacgtttcttcttcgataccggctctgttgcctcattaccattcgccaacatcaagaagacactagactcaccccatgtagggataaaagaatcgtccgcccacagcaccaaggtatcgccctcatgcaataccaccgtatccagattacgggtaaaacgctgtccgccgcttttcacctctttcacgatcgccccgtaatggcgggtaaagttaaactctcccaaggtcttgttgatacccgggaagcgtgcgcccagcacggcctccacccggtggaaattcccgggattctcatcctccccgtcttcggataccgtatccgtcctcgagtccggaagcagtttattcgagaaagcgaacaaatataaaataccggcgatagcgataaaaataccgactttccccagctcaaacatcgtaaaaccctcatatcccgcctccagaatcatgccgtgcaccaccagattcgtagaagtaccgatcaaggtacatataccgcccaatatcgtgacatacgagagagggatcaagaatttcgtggccggaagcctcaccgcctccgcccatcgcttgatgatcggggcgaaaataaccaccaccggcgtattattcaggaacgccgacacgaaagctacgggcgggagcatcctcgcctgcgccttgaagacggtggtcttcccctcgggaagcagtttcttgatcaattggcctaaagccccgctctgccgcactccctcactgacaaggaagagcatggctacggttatcatccctttattgctaaagccctccagcatctccttgggagtaagaatgcctacgcagagaaaaaacacgaccactgtcagaagaaccattcccggccgcatcttatcccataccaaggcggcgatcatgccgatcagggccagcaacacaaacactatatcaaaattcatctatttacttttaagagcgcaaaaataataagaatactcaagtgcgcactcctttcgctaacctatttttaggattatatgggatatagaccaataatgattgattctgggccaacttatattcttacaaggtagtcttctaaatttcgttcataaccaaataaacaagaatgcattgtacggcttgtagagacggagcatgctccgtctcccaccgctgacagtaacttaaaatacacatccccctcacttcacgataaaccacggattatgcaaatcttccttgttatagcgaagcggggtcttaccgtcgatatgatatatgtcgcaaccggcagacttggcgatggcgtggccggcggcggtatcccattccatcgtcggggcgaaacggggatagatatcggccgagccttccgctaccagacaaatcttcaagctgctaccgctactgatcaacgtaacaggctttccctgcttgcggagattatcgatgaaagcggtggtctcctccgtttggtgagaccgggatgccactaccacgattccctgatgcgccagcgccatcggcaaatgtatcgccccctgcttcatctcgtccatcgagggctggctactgctatcgattcccgtaaacttataagcacccacagaggaggaggcgaaatacaactccttccggacgggcacataaatgacgcccaacacgggcacacctttctccaccaaggcgatattcacggtaaactcgccgtttttcttgataaactctttggtaccgtccagcgggtccacgatccacagcgtctcccatttggagcgctccttgaacgggatctcctttccttcctcgcttaagaccggaaacggggtaacggacaaagcgtttgttatcaatcgatgggccgccttatccgcctttgtcaacggcgagttgtctgcttttctctctatcccgaagtctgattcggggtcgttataaatatccatgatcgacttgcctgcgtctaccgcggcacggatcgctatgtaaagataattggcgtagctcatcatcacttctcgttttattatttgttaataagcaaatatatggaaaaaaaaataaattaacgccctgtcgcctgtaaatattccgtacgtttgatcaaataagccgtataatcacccgtatactggtcacggctttgctggaggagcgattgggcgtccagaagatcgctcagcgttaccgtgcccgccttataatagtccgtattaaggcggacattctcctcggccgtcgctatggattcctccgagagcttgacttgcttataagactcctccagctcgttccaaagcttccgcatttgcaccaacagaagctcattggcgttttggcgggaatactcggccgccttcacctgaagcttttgcttccggatggcgtgcgagccgccccaccaatcactgatcggaatcgctacggtagcgaaaaccatgccgaacggacggtccttatccagtaagttgtgatacatatacccggctccgatccccacggtgggcaagtattgcccaaccttcagcttttgttgaagacgggcggcctccacgttcttctccagcaatttataagagagtgtcgtagggagcgcctcctcatggctcacccggtaaagctccggggagggcacctcgacgggcagcgtgaaatcgatctcgaaatcatcttccccgataccgatatattgagccagcaccatcttggaaaggcgcaagccgttctccacccgcaggcggtcgctcgccacgccgttctttttcaactggacttgcagtaggtcattacgagtcgtcacgccggcgccgaccgctacctccacatccttataaagactccccaccaaggattccacgatctcgatcgtccttaatttctcgtgaagggagatccattgccagtaataccgctccaccgtcagggctacctcatcctcggattggcgcatctggtaacggctcacctcgagcgccaagtcggccagcttattgccgttcacgatctgtccgccggcgaacacgggctggatagcggtcaccccacccagcaagccgtcatccatcatcgacaactcgagaaggcccggtatcacgctcatatccatcatcccgtggttcgccttaaaagctgttcccacggcgctgacattcggaaagtatttcgtaaaggcctctttttttccctctctcgccccttctacgtccaaacgggcgttcttcatcttcgcgttattctccaaagccatttcccggcattcttccagcgataatgtccgctgggcgctcacggtccccacgcataagacgagggaaccgacgatgccatatatccatctttttatcatctcttttttccgcatatattcattcctatattatatcctaatccacatccgtatcattcatttattcccgaatatcttccaatagaaaacaggcaggatgatgaccgccaagatcatcgagaagaccgttcccgagcagatcaccacacccatcggcatccaaagggaactgccgctgatgatcatgggaaccacgcccacggccgttgtagccgaggtcaggaagatcgggagcatgcgtcgccggccggcgtcgaaggcggcatccctcgggctataatgcttatgaagccgcaagtcttgcgcatgctcgaatatcaagatagcgtttcgcaccacgataccgatcaagctgataacgcccaagacgcacgtcaagctgaaatcgatatggaacgcccacaagcccagcgccgccccgaacaaggtgagcagcaacgaggacagggccgccaacgccaagccgatcttcttgaaattgaccaacaggaagaagaaaacaatgatcacggcgatcgccaagccctgcatcagcgggttcatcgtctcgaaatccagctccttggctccaccgtactcgtacgtcacgccctcgggcaaggtcgggataatacggctttccatgactcgctcgatccgtttctgcatagcgttctggttggtcccccgggttacctcggcgaagacgctcaaggtacgcacgccgttgcgacggacgatctgcccctcattccagcctccctcgatcgtggagacttgccggagcgggacgctcacgccggggacgatggtgggaagatactggtcgccgaccttatcgaacgcatcaccctcccctttcttatcggatctcagctggatcggcaaagcgtaatcgccttcccagagggagccaaccgagaggccgtcgtaacggatcgccagatcggccgaggccatcgccttcgtgatcccgaggcgggaggcttccactgggtccaatcgaacccgtacgtcgggtaaggcctcctcataattggtgtgtacccagaccaagccgtccatctcacgcaacacggccatcaaggaatccccggcctgcttcaaccgggcgatatcgtctcccatgaaacggacctctaaaggagaggatacgttttggtaatccagttgcttgaacttcacgtaagcgtcggggaaataatcggcgtagcggtccgtataatcatccaacacgctacgggtggcctctaccgaggcggtgttgacaatgaactgggcgtaattcttcccggccaagttcggggcgtaggtagcttggaaacggggcgaggaagttccgataaaggaggtgacggacaggatgcgctcatcttccgacaacagcttatagagactatcgctcacggcggcggtacggtccagcgaggttccctgcgggagatagatctcgacggcgaactgatcccggtcggctatcggcatcatacgctggctcagttgggtgatcatcaggatcgccaaggcaaccgtcaagacgcccagaccgatcgtggttttcgggaaacggaaagtccacgtcagtgccctcgtatagacggcctgtacggtatccagcagattgaacctcttcttgcccgtattctcccgcccggacttcaatcccttcttgatcaagacccgctccagcagcgggataaagaccatcgccaccgccagcgacaccatgagggagatggaaagcgtccaagggaagaaggtcacgaaatccaacatctgccccgtcatcgtgaaaagcaacgggaaaaagatcacgcaaatacacagcgtagccaacaaaatcgagctgaaatagttcttggcgctatagacggcggcgtaccaacgggaatagcccttgtccagatattccagataggcgtctatcacgatgatggagttatccacgatcatgcccaataccacgatcaaggcggccagcgtcaccgtattcagcgggatgccgcaagcgtacatgacaccgatcgagataaagacactgatcgggatggaagtagccgcaaccaatgccgagcggaaagggaagagtaccatcatcaccaagatcacgaccacgatggacacaaacaaatcccgcacgaaggaacttaccgagtctcccaccaccttcggctggtcggcgatccggcggatcgagacactctcgggaagatcccgctcgaaagcgtgcaatacctcgtctacctcctttccgtatcgtacgatattatggccctcacgcatctccatggaaaggatgatcgctttcttgccgttgttcgttatatagctatccggctcgggatattcccgcacgatacgggccacgtctttcaagcggatcatatgcccgtcggcatcggccagcaggatctgctcgcctacctcccgctccgagggataggtcacggaaaggtggatgggaatgtccaagccgccattctccaaggagccggaggcggtggtaaagccttgggtgaacaaggttgtcatcagcatacgggtatctaggccgtaagcggctagcttgtctggatccaagtagaccgagatctgctcgttttgtaccccgtaacggcgcaggttggatacggactcgatccggcgcaggcggtcttccagcgtctccatgtatcgctgcaattcccggtaggtcttgtcttccgattccaaggtgatcaataaggcggaagtatcgccgaaatcatcattcgcgatgacggcgagtacgcccgagggcagttgcgacttgaagttctgcaagccgagcttgatcttcgaccagacctcgtctttattgttcacgtcgtcgttcagctccaccattacgtacaccattccatcccttgacatggagtacgtctttttcttctttacctccttgaaggtaaacaggtatctctccaaaggcttggccaactgctcctccacctctcctgaagtcgccccggggtaaacacccactaccacgccttggcggatggtgaactccggaaactcctgtttcggcatgtccaccaaacccaaaatacccaacccgaccagcacggtaatcaccagcaacgtgatctggtaatgacgcatggtccattcgatcactccgtttttacgttctctcataacgcacgcactctcatgccctcactgattttctggtaaccgcctatcacgacgatatccccctcgttcaacccttccagaataaacaagcctcgctccgtcaagtcgcccgtccgtacgggcgtagctttcgcctttccgtctacgaccttccagacgaaacgccccccgtcgttcgctatcagcacggcgttgttcggcaaggcgatagccggcacggattcctctcccgacaggcgtacatcgcaaaccatgccgggcaacaaagcgccagacgggttctccagccggatcttcgcctcgtacgtgtgggagatggggttggccacgatacctttctccgtcactttcccctcaaaacattgtccgcccagagcggctacctttatcatggcggcttgatcgcctagcgtggcgacctcgttctccgggacggcgatcttcacgtttaccgtctctatccttaacaaggagaaaaccggttgcccgggctgcacgttctctcccgcctcaaccatgcgcttgccgataacgccgccgaacggggcatacaggttccggtcctcaaggtttttcctcgagattcgctccatggaacgggcctgttccaatttgctctccacctctacccatttcatatccggcaggctcttattctcgtgcaaggttctcatgcgggcataggcgtcctccgcttgtcgcaaggaagcggccgaggcattataggcgttttccagcgtcgccttgtctaacaccgctagtagttggccctcacggaccttctgcccctcgcccaccaatactcgctctacattacccatcacctgaaaactaatcgaggaagatacgacctcctctaccgttcccacataattccttgtatcagccggaacggtcttcgctaccttcacgatctccaccgggatctctttactatcccgtccctctttttgactgcccgaacatccggacagcacgaatacgacggataataatcctccataaacaatgcctttcatccttttcatatcctatgatttattataccgcgaagatgatgagtttatccactccaaagaagttccgttttgcaaccaaattgtcccatttgacacatttcaattggattattctattatttcactaattttatcgcccaaacaagaataaattatgaacgtaacagatctacctcaagcttgtatctctcttatcgagaacgtacccggcatagacttcatcgacgaggatttcgccatattcgataacatcgacgatattccctcgctcgaccatccgatgcgaatagacgccgtcgtattcgcgctttgcacgaaaggcttcatgcgtatacggatcaatatggaggaatatgtcgtaggggaaaaccatctcgtattgtccctgcccgatcagatcatccaacacgtggaacgtagcgaggacgtagccgggatcttcatcgtcatctccaagaatttcatggaggagatcattcctcatatacagaataccttgccggcgttcttctacatcaaggagcatccggtcactgagttgaatgccgaggagataggttgtatcaaggaatatcattcttttctctggaagaaagtgaaagcgaaagggcatccctaccggaaagagattgcccagagcttattgttggcggtattccacgaggtttacggcatgtttaagaatcatatgccgatcgaggtgaagaagagccggcaagaggagttgttcgcggcgttcatacaaacgctcgccttacatcataagcaggaacggtcggtagctttctacgccgggaaattatgtgtcactcccaaatatttatcccttttggtaaagaacgtcagcaaccgtacggccggggaatggatcgataattacgttgtcttggaggcgaaggcgttattatcctcctccaccctttccatccaagagatatcagaccggctaaacttcaccaaccaatccttcttcggtaaatacttcaagcaacacgtcgggatatcgcctacggagtatcggaagaaatggtaaaatgagggcgagcagttcccacccctattctaattatcctccgatcaacgcggttatcccacaggaggcgaattgatcgatacacctttgcaggactgcctcggaaggggtggatagtggaaggtgcccggggttgtagagggttcctcgcttatcgtgcttaccttttccgatgtcgtggtacgggaggagattgacgactttccgctcccatggcaaggaggctaggaagatggcggaacgggatatattttcctcgtccgcattgactccctcgatcaacgggatacggatgaggaagtctatgccggcctcggcgatcatccgaagattggagaggatacgctcgttcgggacacccgtgaaacgacaatggctaccggaatccatatgctttaaatccaccagaaaaagatccgtgcgctccattacgctacggacggtatccggcgaggcgaacaaggtcgtatccaccgcacgatggattcccaactctccgcaacgatccagcagggcaaccaagtccgacggatgcgacaacggctctcccccgcagaaggtaacgcctccctcggagcgatccataaagaccgtctctttctcgatctcacgcatgacctcgtcgatagaatactcacggccggacatctccatcgccaaggtgggacaaacctcggcgcatctaccgcatgtccggcacagagaccgatccgtgacgatacccgcctccgtcaaggtcaacgccccggtgggacatacatccacgcaggccccgcaacctatgcacttctttctcgtatacagcttctccgcccggggcgagatgccttccgggttatggcaccatacgcaggcaagcgggcatcctttcatgaagatcgtgacacggatgcccggcccgtcgtttatggcgtatcgtttgatatcgaataacagcatggctcagaaagtctcttgctccgtccgtgcgatcacgtccgcttgcaaatcggcgttcatatcgttgaaatagtcgctatagcccgctacacggaccagcagatcccggtagtcctccgggcacttctgggcggcgtaaagcgtttccgtatccacgatattgaattggatatgatggccacccaaggcgaagtagctacggatcaaggaggccagcttcgagatatcctcctcccgtcggagcaggctgggcaggaagcgttggttcagcagcgtgccgccgctcttcacctgatccagcttgccgagggacttgacaacggcggacggcccgtgggtatcggctccgtgcgagggcgaggtaccatcggagatcgcacgcccggccaagcggccgttcggggtggctcccatcaccttgccgaagtagacatggcaagtggtggataacatattcaaatggaaacactcccctttcgtattcggcttgccctcgatcgcatcatataaatcgtcgaagacacggacggcgatctggtcggcgtacggatcatcgttgccaaagaaaggcgtacggttcaggatcatttggcgcatcggctcatgtccctcgaaattatccgccatcgcatccaacaaggcttccatcgtgaaggtcttatcctcgaagacgtgtttccgcaaagcggaaaggctatcggttatcgtgcctaatccggtacactggatataagtggtgttgtaacgaggcccgcgatcgtaataatccttacccttcgcgatacaatcatcgataaacagggagaggaacgtggcgggggcgtacttggcgaacatgcggtcgatatagttgctgacccgcaccttcatgtccacgaaataatggatctggcgcatgaacgccgcgtaaagctcctcatacgtccggaaaccacggggatcgccggtctccagaccgaccttgcggccgcttaccggatctacgccgttatgcagcgtcacctccaatatcttcggcacgttcaggtaaccggtcagcacgtacgcctccttcccgaaagcgcccacctcgatgcaaccgctgcaacctccctcgcgggcatcacgcagcgacttgccttgccgcatcaactcctgcacgtacacatccgggttgaataccgacggatagccgtggccttggcggatcaccttgcatccgacacggaggaaacgctccggcgtacgggcactgacgtggatggcgctgccgggctggaggatatgcagctcctcgatcgtctccaacatgatataggagacctcgcttacgccgtcgctgccgtccgcccggatgccgccgatgttcaggttcgtgaaatcgttataggttccgctctccttcgccgtgatacccactttcggcggggcggtatgattgtttaccttgatgaagaagcaagacatcaactctttcgcctcgtcacgggtcaaggttccggcggcgatctctttctcgtaaaaaggcgccagatgctggtcgaaatggccagggttcatggcatcccaaccattcagctccgtgatcgtacctagatggacaaaccagtacatctggatcgcttcccaataggtacggggagcgtgggcgggaacccagcggcatacctcggcgatcttcctcagctcagcggcacgacgaggatctttttcggtgagagacatctcgtcggccaagtccgcgtgtcgctcggcaagcaggatagcggcgtcgcaggagatagacatggccgtcagctcctcctgcttgtccgtggcctcggggtcgttcatgaaatccaaggcgcttagttccccctcgatacgtttcttcaagtccagcaggccatattggtagaccttgccgtccaaagcggtatgcccgggggcacgttgctccatgaactcggtgaacatacccacctcgtacgcctctttccattccttggggacgtggctgaagatgcgttcccgctgggtacggcctttccagtacggaatcacctcccgctcgtaggtatcgatatcttcttgggagatagtgtaacgttgcaactcccgggtattcaatatatgcaagtcctccacgctatggcaggtaagttccgggaaggtaggcacggccttggggcggggcccccgctcgccgacgatcaactcgtcctcaccgatatagatcgtcttccgcttgcagatctccaagaagttcagggcacgcaggatagggatcggatacttcccgtaattctcctgatagaaacgggtctcgatcaaggcccgctcgatggagagggaaggttgggcctcgaaggtctgccggcgcagacgtttgatacggtcgttcatcccgaaattgttcgctcctacggaagagacggtatcatgtacgcatgaatgtgtgtgatgggtcgtattcataaaattatatgttttatcgtagaggtaggatctatccaccctcatcaaggttattttttattgttacacagaacgggcatccccgcccccatgagtttatatagggagagtatctgctagagataaaacatcaggcagttgaaaagcatccgatagcctttgtgtaacataacgcttgtttctttttgaagtatgatggcaaaaataaggaaattattgataatatcacaattcatcaacagaaagtaaccgtttgtcaaaaaaataacacaggaacgtaaataaaggaatagctttgctttgtatttccagatcaaagggtttaaaattaaaagaacttataccatgcaaagtacattcaagaacctgctttatgtcttgagacattataaattagcgacggtcactaatcttttaggacttagcttcgctttcctgttattcatgctgataagcatacatgtcggtcatgaatatagcttcgacgcttccctcttgaacagggaaaggatctttcagttagaaaacaagcgggatgacgggatatgggaggctaatttcgcacgtccacaactcgagcgtttcatcgccgcctccccttatatagaagcggccgctatcacaaacaaccttgtttactcctccgtacgttttgggatatcagccagtgaagggcccggcgcacggagctatatggagcaggtggaacggatcaccccgggatataccaaggtctttggcttcgaactggtggccggcgatacggattgcctgaaacgtccggaagggacgctgatcccagagagcatggcccggaaactcttcggcgaggaaaatcctatcgggaagccggtttatctgtcggagttcgccggggccgaaggctcgattatatatgggcttagttttgagccggcatatatcgtgggaggcgtctttcgcgatttcccggaaaacacccgggtgaagaatgccctgtatatcccgatcatggagaaagagatgatggaaaactggcataccggcctttactattgttatctgctgatgtcgacgccggaatccgcctctgtcactaccgagacctatatggccgatagccgggctttcctgaaaagtttcacgatcgaggatatgcgcctccggcccttgtctgatctctatttcggccagccggtccgagcggacgccgctcccatcggtaataagctacggacgaatatgttattctttatcgccatcctgatcataggtatcgccttggtcaattatatcaacctgtcgatagccttggcgccgatacgcaccaagtcgatcaccatccagaaagtgctgggaagctcggacgccacgctacggaagtatctggtcttggagtccttgggaatctcggttgtcgccttcttcctcgccttgcttttcctgttatttttgaataacgtgcaatgggtcacgaatatggtggggcatccgttgaacctgtatgccaactggaagattccggcgtacacattcttccttgtcgcaggcggcggtatactggccggtttgtatcctgctttctatatcacctcgtttcctcctgtcatggcgctgaacaagtcttttacccttagcgaccgggccaagaacactcgcaagttacttatagggttccagttcgttatctcgatcacgctgattgtcggagcgttgttcgtctccttgcaaaacagatatatagggaacgtggacttggggtttaacaaagaaaacgtactggaggtaagactaagcatgggggcggccttgaaaaagggcgaattgttcaaggcacgtctcttggaaagccccgctatccgtgatgtttcctttagcgagttcaaatttgtctcggacgaatcacgttctttcatcgggtataattacaagggacaacattattatatgagctggctgggagtatccgccaatttcccggagctaatggatgtaaagatgatcgccggaaggaagttccggccaacagatgaggcggcggataacacgcaggccgtttgcgtccttagcgagacggcagcgagggagatcgcctcgggtctttcccccgagaaaccggacgacctatcggacttggtagggacaagcatcacggataatgatataccggtacggattgtcggtatctttgaggatgtccattatgaatccctgtataaagagttacgcccgatgggactttggacctcggctaagaatcattaccgccgttcggtgccggaaagatacgcttatgtcaagatcgccggcggaaatccccggacggctatcgagcatatccggaaggtaacggatgaattgatcccgggttatccggccgatatccatttctttgatacggcgctggaggagctttacagtaaaagtgggcggcagggagcgctgattaccgccctttgcctgatggccgtctttttatccctcgtgggagtattcggactggttatctttgagttacagggacgggaaaaggagatagccgtgcggaaagtacatgggtccacggtccggcaaatcctttggatgctgaactcgtctttcctccggatcacgctcgtctgttttattatctcgatcccgcttgcttactatggggtgcatatttggttacgaagcttcgcttataaaacgccgatctacgtatgggtatttttagtggctttggtaatcataatgacactgaccgtatctacggttactttccagagctatcgggcggcgatggcgaacccggcgtctaaattgggacattaaggttcattacgaaaaaaggacgggtagattgatccgtccttttttactcatatattatcttgtctcaggtttggttaccgtttccaataaccttccatctcctccagcgtctttcctttcgtctcggggacaaatttccagatgaacaacgccgccaatatacccatcacgccatagatccaataggccataccgtgattgaacgtatcggtcaagtattgattcttatccagcatcgggaaggtccatgacaccaagaagttggcgatccattgcgccgctacggcgatactcatcaccgtggagcgaatcgagttcgggaagatctcggccagcagcacccagcagaccgggccccacgacatagcgaatcccgccgtataaaccagcatgcagaccaatgatcccatacccaccgaatgggtatagaaagtagttcccaagatcaacatagataccgccatgacgagcgccccgataatcatcaacggacggcgtccgaacttatccaccgtgaaaatagccaatacggtaaacgacaggttcaccgcccctaccacgatctgttgcaaaagggcggcgtccgtggccgctcccatcgtcttgaagatctccggggcgtagtaaagcaccacgttgatccccacgaattgctggaaaccggagagcagcacgcccaccaagatgatcagcacgccaaacgaccggatcgggaacagcaaggcgatacagaaactagccaacaaggcgatctccaacgcattcgtattacctgcccacgacaacaacccgtagccggccaagaacagcgccagccaagtccccataaaccggaagtaaggcttcatcgacggagctttctccttgaaactattccgtatgtcctccagctcacggccagcgtccgcccgatccatcaaatggctcaaaacgcccaacgcctgctccgtacgcccacgcatcacgaggtaacgaggcgtctccggcacgaacatcaagaacgagaggaacaataccgccggaataatctcagaagcgaacatccaacgccagccgatcgtattcagccaagcagcatctccttgaagggcgatcgtataattcacgaaatataccaccagcataccaaagataatggcaaactggttccatgccaccagattcccccggcgatcggccggagccacctcggcgatatacatcggcgataccatagaggccagccccacgccgatacctcccagaatacgataagccacgaacgcatacataaacgtatgatcgccacttccgggcatgccgataaacagctccggccaagccgagccgatagcagaaagcaagaaaaggatagcggccagtatcaacgtaggcttcctgccgtaacgctggctgatccacccggcgaacgaggcgccgaggatacatccgatcaacgcactactcaccacgaacccctccaaggcgttggcttgatccaacggaagcccttgcggctcgatgaagaacttacgcaaagactccaccgtaccggagatcaccgccgtgtcatacccaaacagcagacctcccaaggtagcgaccaaggtaagagcgaaaatataagtgttgttacttttcatggaatagatttattaattaaaaactgagaattgagagctgaaaactagggcttacgcacgataattttcaattcccaattctcgattttcaattatttagatatgcagatttacaatcatctcgtataattcctgcttaccgctgatctgtttcggctcgccgtcacgcaaagcgatcgtacgaagatcttccagcgtaagcttgccatcctcgaatgccttgccctcaccggcatcgaaactagcgtagcgctcggcacgcatcttgcggtaatctgagtgctcaaggatatcggcggcgatcatcaaggcacgggcgaaagcgtccataccaccgatatgagcgatgaagatatcctccaagtccgtagaattacggcgggtcttggcatcgaagttcgtacctccggtagtcaagccacctccctcaaggatgaccagccaagcctgtgccagctcatagatatccatcgggaattgatccgtatcccaaccattctggtaatcgccacggtttgcgtcgatactgcacaacatgccggcgtcggcggcagcttgcaactcatgctcgaatgtatgtccggccaaggtagcgtggttcacctcgatattcaaggcgaaatccttgtccaatccataatggcgaaggaaaccgatcacggtctccgaatccacgtcatattgatgtttcgtcggttccatcggtttcggctcgatcaggaacgtacccttgaaaccgttcttacggccataatcacgggccatcgtcaacatcatggctaaatgatccttctctcgtttcatgttcgtgttcaataggctcatataaccctcacggccgccccagaatacatagttctcgccccctaaagcgatacaagcgtcgatagcgttcttgatctgcgtgccagcgcatgccacggtcgggaaataagggttcgtagcggcgccgttcatataacgcttattgctgaagacgttcgcagtagaccatagaagcttctttccggtagcggcttgatgctccttggcatgttccaccatcgtctgcaaacgtttctcgaactcgcccagcgtaggagcctcgtccaccacgtccacgtcgtggaagcaatagtaaggaatattacatttggtcataaactcgaaagcggcgtccatcttgtacttcgcacgggtgatagcgtccgtgctgtcgttccaagggaatgattttgttccaccaccaaactgatcacctccctcagcacataaggtatgccaataagccatagcgaagcgcaaatgatcctttagtgttttacccataactaccttatccgcgtcataataatgaaatgccaacggattttttgactcacgtccctcaaactgaatctgtccgattcccgggaaaaattctttctctcctttaaagtaactcataataatatatattaaaaatgtaaataattcagccgttaaatagattgttccaagcgttctttccacgtctcgaacgccccgcaataagcattcgccttgaaaccgtccggctcgatcacgttgatcttcttcaaggaagcgaacgcttcttccgcgttcttgtagataccggcgccaataccggcccccttggccgcgcctaccgcaccattcgtatcatacaattcgatcaccgtacccgtcacgcccgccaaggcatcccggaagatcgggcttaagaacaagttcgcgttccccgcacggattacctgaatatcgatccccatctcattcatgatatccataccgtatttaaaggcgaacacgataccttcttgcgccgccctagccatatgggccttggtatgtatgttgaagttcaatccatgaaccgagcaatcgatctgcttattctgcaacatacgctccgccccgtttccgaacggcaagatcgaaagaccatcgcagccgatgggaaccgtagccgccaaatcattcaactcattatagttgataccttccggcgctatattccgtttgatccaagaattaaggataccgaccccgttgatgcacaacaagacacccaagcgggtctgctccgtcgtatggttcacgtgggcgaacgtattcacacgggaaagcgtatcgtaattcaccttgccgttcacgccatacaccactccggaagtcccaccggtagccgctatctcgcccggattcaatacattcaatgataaagcgttattcggctgatcacccgcacgataggtaaccggcgtacctttcttcagtcccaactcggccgcaaccgaggcggtaacctcgccctgcaaaccgaacgtcggacggatatcggcgatcagatccttactgaatccataataattcatcaactcctccgataaggcattattcttgaagtcccagaaaatcccctccgacaaaccggaaaccgtagtcacgatatcccccgtcagacgcatagcgatgaaatctcccggcaacatgatcttatggatacggtcgtagatatccggctcgtactccttgatccaagccagcttagaagcggtaaaattacccggcgagttcaataggtgggaaaggcatcgcttctcgcctatattcttaaacgcacgctcgccataaggaacggcacggctatcgcaccagataatagatggacgaagcacctccatcttcttgtccaccaccaccaagccatgcatctggtacgagataccgatcgccttgatatcctcgcctttcaccttcgccttgctcatggcacctttcatagcgatcttcacgtacgaccaccaatcctccggattttgctccgcccaccccgggcgcaacgccttgatcggggcctcttctttgggataaaaatccgcacctattgttaacccggtctcctcatcgacaatagagaccttgatggaagaacttccaatgtcacatcctaacagacacataatcgtatggttttatatcttattaaacttcgaacgttgttgattatatttcaccttatcaaaccgataataccgtgcggcacgatgggcgaccccgtcttgcatatcctccgtgggcaccacgtaatccaaggaattcatcttcttatgaaaattgcgcacgtccatctcacggttatagatcacctcgtacgtgcgcctaagctggaacgccgtgaacttcatcggcatatagtcgaaaatgatagcgggctccttctccacccaattacggatctcctgtatggcagcctcgataatctctttatgatcgaatggcaagcgaggaagctcgtcgatagggcaccaacggatcgagtcggatttatcggccggacacgtcttcctgctgttcttgcacaaggcgagataagcgaccgtgatcaaccgtccgatcttcaccttggatgtcgcctccagccacatcacgtccaaccggttcgaggtacgggcgggagaaccaaaacaacggaattgtttcaattggacacgcttcaagccggtcgaatcattcagtatccgataggcggcgtcatctaaatcctcgttctcatagatcaggctgccgggtattttatagccgatcaactcgccttcctcactttttcgctccgccaacagcacggtgagcttgtcatcattgatgccgagaagaacgcagtctacggaaacatagggggaaagcatctctctattctcgttttgtgtatccatgatatcagtaattagatttgcgcaaatataagtatttttctaaacaaagcaattacaaaaggtcttttttgcacatcctaattgattatttttctgatatttcagtatcgtacatcatacaatatgctatacaacacataatgtaagtaaaacaattagtacgagaacaaataatgaaggcgctttcacgtacctctaacttttatttcctacatttgttatatttataaaacatcggacatgaatctaaaaaacatatacttctcttggctgatttattggggtaaaatgaagggattgctgaacgggatagcggaagcgatcatcctactcgcctccttagcctctttcttcgtattgatctaccaattcggctttgtacagacacccgattccgtccatatcctagagcgctcccgcccattcatcctgctagcttttttcacgggcataacactccggtacgtggtgaggttccaagaaatcatacaggagaaaatgttgtatctcgatatcagcatctatttccttttattcgccgtattatccagcaagatatttttcaaggatgccatagcgcactctttgccttatttgtctttccttacgaaacctctcttcgtatatgtcttattattgctgcttagcacgattcacttatcccggcagacgttcacgctgatgcagacacggatcaagccctcgttgcttttcttgctcagtttcgtgttcgtgatattggtcggggccgggttgctatcgttgccgaacgccactacgcaccggatcccgtttatcgacgctttgtttatctccacgacctcggtatgcgtaaccggactaaccaccgtcgacgtagccactagtttcacgcatatcgggcatattatcatcatgattttaatacagatcggcggtatcggggtcatgacatttacctctttcttcgccctctccttcatggggaaatcctcttttacgagcaagatgatgctgaaagatatgttgaacgaagatcggacgggagggttgttccgggtcatcttaaacattcttttcgtgaccttgtttatcgaggggatcggcgcctattttatttatatggacgtacggggaagcctgccgggaggtacgcagcaggaattattctacgcaatgtttcatgccgtgtccgctttttgtaacgcagggatctctaccttgagcggcaatatgtacgatccgttagtggcggataagtacaacctccatttctggatagccatgctgattatattcggaggcttgggcttcccgatcgtcttcaattacctgaaactcttgcatcacttgctgatgaatggtatcaagatattgatcggtaagcaaaagcattatatccatacgccccgtattattaatgtacatacgtacattgttgttatatctaccttgatcctgttaattaccggaacggctttctacctctttttcgagtatgacaataccttgggcgaccttcccctgcgggggaaactggcaaatgcgttcctaggcgccgtcacgcctagaacggcaggattcaacgtagcggatatggctacattggcccctccgaccttaatgctgacgttgattcttatggtaatcggagccgcccctatgtccaccggcggcggattgaaagtgaccaccgttttcgtagctttggttacgaccctgaacgccgcacgcgagaaagataaagtggaagtgagaaaacgggagatcgccccattcgccatccgccgggcattcgctatcatcatgatgtatttcatgtgggtggcgatcgctacgtgggtattatcctatacggaaaaaggggcgccgctgttctccctattgttcgaggttgtttccgccttgagtaccgtaggcttgagcatcgattatacccctcacctcacccctatcgggaaaatcatcattatcagcacgatgctggtcgggcgtatcggggtattggccttcctcgtaagtttctgcaaggaatacacgaaaaaggactatacatatccacaagaaaatatattaatgtaaaaataagatagcatgaaatatttagtaatcggattagggaatttaggacgtgcgatagcgaaagacttgacacgtgtcggcaatgaggtgatcggcgtagacatggatctgcatcgtgtcgatatgctgaagaacgacatagcgggggcggtcgccttggactctacggacaaagaggcattgagcaccctgccattgagtgaaatggatgccattatcgtaacattcggtaaggatttcgggacttccgttcagaccgtcgctttattgaaaagtctggatgcgggcaaactgatcgtgcgggcgatctcctcgatccatgagacggtgatccgtgcgatcggggtaagcgagattattaccccggaaaaggatttctctacgatgtacaccttccaagcgtctttaggcggcctgttccggcattggtataaagtaaccgacactgaacatctctataagattaagacaccggccactcttgtcgggcaaaccatcaagaacatcgatttcgaggagaatttcggcatccatctggtagcgatcgaacgtccttacgagaaaaagaacctgatcgggctcacacagacagaatacaaggttatcagccgtatcaccgaggaattgatgatcgaggcggatgatctgctgatcttattcgggaagatggagctattgaataaaatagccaacatctaaaacaaaacataggcagacgatcacgatataatcagcgtcgtctgcctacggcaaatatcaacgaagcgatcaagcccccgctatctctatcgtataggaggcatcgaagagctctcccggttccaaatgccatacccaatcccggtctttatactcacccgtataatccacccggtcgcaacgtccataccaaggttcgatacagacaaacggagcgtttctcgtaggcggagaccataaaccgaccaccggagccgtaaaggtgagcgaaaggtacgggcgtttctccacatccaataagtccacccgcttaatctggctgtcctccaagataaacgtatcgatatcgaacgtatggatattcaacggcagcaagccgtccgcatccaaaggtaccggacgaaccacatcccctacgcaccctttctccaccagcgcacggtatacgagatcttttttcacatcgaaagcgaaataccctcgatccggttgatccacctcataattcgggtacaggaaagccggatgagcgccgatctggaaatgcatcgtcttatctcccgtattcttcacacgccaaagcacctccaccttattgccctccaaacgatacccgatctccagaaggaaagggaacggataggctctcagcgtgtccggggtactttccagcgcgaaacgcaactcgttctccgcctcatcgatcaacgtaaaatccatatcccgcgcaaagccgtgctgcgacagcggatacacggttccctcgttccgatactcggccttccatacgctcccgacgatcgggaacaatactggggaatgacgtttccagaaagcggggtccgcttgccaaagatactcctttcccgtagcattcgctacgatactactcaactccgctccatgttcggagacacggatcgttagttcttgatttgatactgtcttcattccttatgataagtttagtaattgttcggcgggaagtcccttgcttttcaagaaaccgttcaaagtcccgaataataagggctgtcgccggaaatcttccagataaacccgtttcaggcagtctaccggcatcgatatcggaacgtatgggatcaagtttccatgctcataacgatagagcacctcatccgtagcttgcagcgaggccaaccgccattccttatcccccaccgaggaaggctgcttcacctccagacaggcgttacacagcatcgagaaaaagcgggaatcaggcgtaaagcccgtgtgctcctcatcaaaaaagaaggtatcgtattccttttccaattgtgccgtaaaatggttcaagataggctccttctcatacttgcaggacaacagggaataattctcgaacaggcaaagctcgcccaacgactgatagtccagttcaaggaccagagaaggctcggcagaccgggccggctcaccgggtttctcatacaaagggatcacgtacatgcctatctccggccccaccagcatccggctgtcctgcctgaaaaagggcatcgctttcttgctcttttccacaggtatccctttgcgttcctcatacaaaccgatagactccctaagcaaggaaagcccatactcgatctcctcttgcggcacgatatgcatcaaccccttcgccggaagcgtgaaaaaggaatcaggccccgaggtagtccgaaagctttcgacaaaagcgttcattgatactctacaatataaaaccatacaatctattttttgcctcgcaaggtagaaaaatattatcagaaccgatatgccttccgacaagaatttatcttattacgcaagatcactgcaacccgggttgcagtaaaaagcagttctactttgtaaaaggagttgactcgcatatcaaaataatcattatctttgttcggaataacaagcgagtaaaaaagaccgtaccgtaaatcaagtataaaccaatatagtatacaattatgaaacgtcgtgattttttaaagaccagtgtcatcgctagtgcggctctatccttaaattttgaaggtctgcaagcggccctttccacgaacaccgtagccgtagagaaggctcccgatatggtagcagttatgggtggagagccggaggtgatgctagataaagccttggaagcccttggcggtatcggaaacttcgtgaagaaaggacaaaagatcgtgatcaagccgaatatcggctgggaccgctctcctgaattggcaggtaatacgaaccccaaattagtgaaagccttggtcaaaaaatgcttggaggccggcgcctctaaagtgaccgtattcgaccacacctgcgataactggcagaaatgctacgagacaagcgggatcgccgaggccgtaaaagaggccggaggtatcatcatgcctgccaacgatgagaaatattttaaggaagtatccattccgggtggcgtgaacctgaaaagcgccaagatccatgaggccctgatcgaggcggacgcatggatcaacgtccccgtattgaagaaccatggtggggcgaagatgacttgcgccatgaagaactatatgggaatcgtatgggatcgccgtttcttccatcaaaatgatttgcaacaatgcatcgccgatatttgcacttggcaaaagaaaccggtattgaacatcgtggacgcttatcgtatcatgcaccaaaacggcccacaaggaaagagcgctgccgatgtggctaccttgaaatccttgatcgcttccccgaatatcgtcgctatcgacaccgctgcccttcgcctgttcaaccaagtgaagaagctggatatggccgccgtaggtcatatcggtaaaggcgaggctttaaagctaggtacgacgaatctggataatgtcacgatcaaacgtattaagatataatcgaggatgaagaagcctaattacttaaaaggattgcgggtcgtactcgcgatcctcattttcgtacccatacttttattcttcgttgatttcgccgatgtattgccggacaacctgcacacgttgttgcatctccagatcatgcccgctattttaggggggatggcggggttggtagtcttccaattcgtattggctttattgttcggccggatctattgctcggttatttgcccggcgggcgtattgcaagatattatcaaccgggttttctgtatcgggaagaagaaaaagaaaggagtacgcaggttcagctatcataagcccatgaatatcttacggtactcaattctcgggcttacattcgtattggctgttttcgggatgatcgaattatgtacgttgctagatccgtacagtaacttcggccgtatagcgaacaacctgttccgtccggtcgtcatgtgggtcaataacctgctggccgacggattggcacggatggataactatacgctttatcacgtcacgattagcaacgtgacggtattcggcgtgatatccgctttggtcgcgttgctcgtattcatcctcatggtcgtattccggggaaggttgttctgcaatacgctttgcccggtaggaacgctgttgagcctgatctcccggtattcgtttttccggatctcctttgacaaagaagcttgtacgcattgtggtaattgcgagcatacttgtaaggcggaggcgatcgacagcaagaacctcaccgtagatacctcccgttgcgtagattgcttcaactgcgtgtcctcgtgcgctaaaggaggattgcaataccgtttcaagccttccttcaagaaagaagccgaaacagctcgcgcacaaacggacgtgatccaacaggctaccgctccgaacagccgccgtacatttctctcggcaggggctaccgtcgcggtctccctcccgatcgtatccaccattgcccaaggaatggaaaaagggcatggcaaagggcagcacgggcaaggtaagcacggcaataaatggccccctatcgtacctccgggagcgatcagcttagaacgtttcaaggatgtatgtaccggatgccagatttgcgtgactcaatgcccgagtcatgtactacgtcccacgggattggagtatggctttgattatatgttgaaaccccgtatcgcttacatcgacagttattgcaattacgaatgcacggtctgctcggaggtttgccccacgcacgctataaagccgcttaccaaggaagagaaagcgactacacaagtgggcatcgccaccttcttcatcaaccgttgtatcgtaaagacggaggggacggattgcggggcttgttcggagcactgccctacccaagccgtgcatatggttccttacgagggcacgctgaccatcccgcaagtaaaccccgatctttgcatcggttgtggcggctgcgaatcgatctgtcccgtacgcccgatgagagcgatcatcatcaaggcgaacgaagtacacaagttcgtggagaagcctaaagaggaagaggtgaaaaaggtagaaatagatgacttcggattctaagagaaaaatgctacctttgtcacaaatttttgatacatgacatttgaattacagtataacgatacgaaatcgaacgctagggcgggcttgattaccaccgatcacggggtaatcgagacgcctatttttatgcccgtgggtacgcaaggtacggtaaagggtgtacatatgaccgagctaaaggaagataccaaggcacaaatcattttggggaatacgtaccatctgtatcttcgtcccggtatccatatcttggagcaggccggaggcttgcataagtttaatacatgggatcgcccgatattgaccgatagcggggggtttcaggtattctctctttccggcaatcgtaagctgcatgaagagggagccgagttccgctcgcatctcgacggctccaagcatatgttcacgccggagaaggtgatggatatcgaacgctctatcggtgcggatatcatcatggccttcgatgagtgttgcccgggagatgccgactacaattacgccaagcaatcactgggcctgaccgagcgttggctggatcgttgtttcgcccgcttcaacagcacggagccgaaatacggctaccggcaaagtctcttcccgatcgtacagggatgcgtctatacggacttgcggcagagggcggcggagaacgtggcccgaaaaggcgccgatggaaacgctatcgggggactggccgttggcgagcctaccgataagatgtatgagatgatcgaggtcgtaaacgatatcttaccgaaagataaacctcgttacttgatgggcgtaggtaccccgatcaatttactggaagggatcgaacgaggcatcgatatgttcgactgtatcatgccaacccgcaacgggcgcaacggccaacttttcacgcgtttcggtactatcaatatgcgtaacaagaaatgggagaacgatttctcgccggtcgatccggacggacattcctacgtggataccttatatagcaaggcttatctgcaccacttgatcaaggcgaaagaaatgcttggcttacagatcgcttctatccataacctcgccttctacctatggttggtgaaagaagcgagggcacatatcatcgctggcgattttactacatggaaaagtggtatggtccgtcaattagcgaaccggttataaaaaacgagacagatgaaatttaaactaaaacggatcgattggtatatcatcaagcagtttctgggcacgtacgtgttcgctatcgccttgattatctctatctccgtcgttttcgatataaacgagaagatcgataagttcttgaatccggatgtccccttaaaagcgatcatcgtggattattacttgaactttatcccctatttcgccaatttgttcagtccgttgttcacatttatcgccgtgatctttttcacgtcgaagctagcggatcgttcggagatcatagcgatgcttgccagcggtatgagtttccgtaggttaatgcttccttatgcggtctcggctacgattatcgctatcgtgacgtttatcctgaacgcttacatcattcccccggcgaatgagactcgtatcgatttccagaacaaatatatccgtaacaagaaggtggattacgtgaagaacgcccaattggagatcgagccgggtgttatcgcttatttcgatagctatgacgctcgctcgaacatgggataccgtttctctctggagcatttcgaggataaaaaattgatctcccgtctgaccgccaagtcgatcaaatacgactcgctttatcaatggaccgttatcgattatatgatccgtgatttcgatggcatgcgggaacatatttcccaaggctcccgtaaggatacgaccttgaccatcgtgccctcggacttcctgatttccgtgaatgattgcgagacgatgacaacgcccgagctaaatacgtatatcaaccggcagaaaaaaagaggtatcgggaatatacagaccttccagatcgagtatcataagcgcttcgccacgatcatggcggcgtttatcttgacttctatcggagcgtcgttgtcttcccggaaaataaagggaggtatgggtatgaatattggtatcggattggcgttgagtttttcttacatcctgtttatgacggttacttccaccttcgctattaatggttatgtgagtcctgccgtagcggcctggataccgaatatagtttatacatttatagcgatattcttatatcagaaagcaccaaggtaattgattagccccatgttggtataaccctgccaaatttcatccagttgtagagacgaggcacgccccgtctttacaacctaggattttcaattatttcgtgaaattaagtccaaactctaacgtttttgcgttcgggagtaattgcaataccatatctaccatttgctgataattctccggaaccatcggtttcaagataggagctatcatggtcaaaaccggtacaattaaatccttatccgcataaaaagtagcctcacttccatccaccttcatgttaagaggtagaccataataacctcctaaatcaaccaaaagcttcatgatctcgtcaatagagataccagcggcctccaatttgtcaccagcagcctgttgtaataaagtagtcaagactgtcacataatttttatccacaaccaccataaatttcccgtctaccacacaatattggatacttgccatttttgtgatctcaccgattcctttatcctcagaagcccctataggtctccaagaaacatcgaagattccatcttccggtaagttaacatttacagcacttactttgccccaaatcaagttaccgatagcaggttttatcataggcacgagattatcgatagtagaattcccggtaactatattcgcataaatagctcccgcacccgctttcaagctccaattacctacgatagaagaagttaatttacgagtataaacaacagaagctacgccccctttcaccgtaccatttactgataccacgcaatcgccaaccgtactctcgccggtaaacgtataagtgccgtccgcttccttcaacgcggcatcgataacgaccgacttattttcggggatgatattgttcaaggttacggatgccttctccgcagaagaagcggcaatcacgaccgatttaccgtcaacagggattgtcacttctcccattaccagatttacgctcttaccctcgtacgttttcgacagatcttgccagttaccggaagaacttgaatcgtcatcatcaccacatgccgtaaaaaaacccatcgtgcaaatcacggcaaatacatacaacaaactctttctcatgactcttgttttaaatttaacataaatagctattaatattatcacaaatatatccattccaacttccactaacaacaataatttaatatcagatgttcgattcctgtgtttagatcaaaataatatcaatctctcacaaacaaagcctccatattctcccagcatttactacttttgtcgtatcaaatacttaaaaacaatctatcatgaagaaagtgtttatctcaatgacctgcgtattaatcgctctatccggttgcacgaatggaggaagcaataaagaatccatggaagtcgtactgaatatcaaacggaaagtaaaacccgaatgtgtctccgccttaaaggaatcattcttgaaatgcaaggaaagcacgttgctagaaccgggatgtatcgactatggcatgtaccagtccctcaccgatagcaccgaattctttatcgccgagacttggaaaaacgacggggaattacaaaagcacggcgaaaccgcccatcttaaacaacatctgaatgagatcaaagatatgggagatccttcctataaaggtagtttccggaagatttatgtctgcccgagtgtaaacgattaatcgttaagaattgaagattgaaaataaacgcttcgtgaagcttgatttttaatcttcaattccctatatttaattacaaaagatctgacgccaattcagataactcgcttcgctcgccttttatcaagttgatatgggcgaacaagtcctgtcctttcatcttgtcgatcatataggccaagccattactttgggcgtctagatacggggagtcaatctgttggatatctcccgtgaagaccatcttcgttccctctcccgcacgggtgataatcgtcttgatctcatgcggcgtgaggttctgggcctcatcgatgatacaataagtctcggacaagctacgcccccggataaaggccaacgcctcgatcaccaactggttgttcttctgcatatcgtcgatcttacggacatcgggattacccggggcaaactgagtcttgatcacgttcaggttatcgaatagaggttgcatataaggagcgaccttttgcttctcgtcacccggaaggaaaccgagatccttattcgccaaagcgacgatcggacgggccaaaagtatctgtttatacgtgccggcttgtttcaaggcagaggccaacgccaacaacgtctttccggtaccggcctttccggtcaaccccaccagcttgatattcggatcgttcaacacctcgaaagcgaaactctgctcggcattacggggctggataccaaagttcgtgcctttatccaccttcttgatcttatccgtaaacggattgtagcgagccaatacactattacgtacgcttttcaagataaagcattcgttcgggtcgagcttagacttgatatccaacgaatctgcgtccacgccttccggagagctgtagatcttgtcgatcaaatcggggtctatattctcataggtctcttgcgcacgctcgaaaatatctacattcacgaccttatccgtgatataatcctcaacgggaatacccaaagaacgagccttcatacgaaggttcacatccttgctgaccaaggttgtcttgatcttcggattcttctcggcgatcgtcaacgcacaagacaagatacggtgatctggagttttatccggaaaagaatgcgctattttctcctggtacttatcaccggtcacgatatagagtgtaccttttcccggtcctagtgaggcgcctttcaagaacaggtcattactggtcaataagtctagctcccgaacaaactcacgggcattataattgatctgctcactccccttcttgaacttgtccaactcttctaataccacgatgggtagatagatatcattttcctgaaagttctcgatgcacttatagtcatgtaatatgacattcgtgtccaacacaaaattcttctttgctcccatggcctttcgatttaatattcaactaataatcaaagatttatattttaatttgtttgccgaaacactctaaaatctctatttcggttatttttcggcaaacactccatataaatttcaattctccgccttcatcatatggcttcctcacaaagatacatttttatatgaattagaattcttcaaaacaaaatcttttttaggcaataatgaatcaaataaaaaagaggatacagtaactcgcaccctcccataaaacaattatcgaacaatacagttcatagcctccaagacattcaacgccacttcctcgtcctttctcttgagatcttcgaatacgtccccaagtgaatcctctgaggttaaagccaaaaacacaaaccacatcaagatttccttgtattgtttatcgtggcttcttactatgtcttgatcctttcgagcttgctcattacttctatattgttcttctttcaattccttgagttgagaaacataatcatcgatagccatgacaagtacggtactcaatgagtagcgatcatcgatcttacgtccagtacactcttggaagaagtcaacggctggcataacctctcgatctccacatagcgttccaagttcgtcatgaacaagtttctcaggtttgctaaaacctatattttccaagaaagttaccactaattgagcttcttcatttataaagtacacgttttccaataaatctttgatctctttgaatcttttcattttcttttgttttaattttatttgttagtatcttggttaccgcaaatcaagcaagatacaattatggatgacataaacatatacgagaacgggtagcgctagcgtttgatattccatgcccagtatgcggtagaaaacctaaatgcgagttcaccatagggcgaaattatatttatcatggctgtgagcatgatgaaattttcaatctcgtagaagcacgcatagataagtttacttcacaatatcaatgtcctaaaggtcttgttcggagggtatttcacgcacgatagcctttcctatcatcaagaatctcatatgaatggagctaaccaagtcatcatctgagaatccttcggtttcctttaatatgaaatcgattagttctttttttgtgattctcccttctggatttaagaacacttgccttaaaggaatagatcactcaatcatatttcaatttcttacccaccaaaaatccctagctttaattttcgcaataatcctttgaccgctcctatcaagcaatcctaaatcagttttcaagactaacccttcagcatcatatgtagtatcttcagcgatcaatgacttgtagccattactaacatactcaatcgcttcctcgaatgtcatatagccaatcactggaactaccttgattgccagatcgccagctatctcctctatatcaggtctccttaaccaccatttatcaatctttacatcgaacaaaatgaagcttacctcatccttgatatagcgacctccacctttctgaatcttcatacctatattcatcataagataacaaccgtgttttataagtattcaaatcaagcatgtcttcttagttgtaatccgttaataaatttattgatctcatccggtccttatcccaatataagtatatgttgtaccaacatttgagtgattcaatacctctttgagcatcatcaaggattcttggcttctcccgtttgcctcgtaaagatatctgccgaatgttttacgaaagctgtgggtggaaaaatgatcaatggaaagattatatctatccttgacatctttcaatcttttattgatctgccaaatccccataggcttgttcttatatccttcaaataaataagagtttaccgaaggcttccccattaaagtatataattcctttatgatactaacagtctcatcattcaatctcacttcccggttcttctttgtctttttctctatcaagattatactatttttatttagcacattttcccatttcaacatacgaatatccgacacccgtaaagccgaagcaaatgcaatagtaaaatacaattcctcccaataaagcctatcctcgcgcaatttttctaatgttgacagaaactcttcgtatggaagataatcagactttgttaatacacctttttttgccataactcttaataattttgttttaattcttaggcaaagctacaattacattttaatataatgctctagccttctcagccttgcttgaacaggaatttatatcatcagctactaaataagtggtatttttactaactgacccagacatggttccaccggctttcgtaatttttgattctagttgtttgtctcgaataccggtaaagcaaatcttcatcccggataatgatgttcccaaaggctcatctttctcccaagcaataggaatctcgttccccctcacccactcaacaaaaccttgacacttgttcgagaactcatctatcatcttatcacctaccccttttgtcatagacatgatttttgtcatcactaagtatccagcaaatgttaattctccagagatccataacctcaaggtcacattatctacattagacaataagattgttgccttcttctctcctattccatcaaaacaatcggatgcttccattaacttagggagagaaacaccatcatcaaaaatgcctcggttcttctctatgatcttgctagcggtatcgtaaccaatgccatctatcttctgtagcgttgaaagatccgtatgaagaagatctcccggggacttgatctcggagttaaagatcgccttcaaggtttcctctcctatctcatcatactccaacttctcgcagaagtaaatcaacttagccaataatctaccgggacaaagcgggtctgggcacatacgctcgaccaaggagtcattccagactgtttccttcccacatgaagggcagagcttgaaagcttcctccacgacatcattggatacaggataaattacgtcttggatttttggtataaccatcccggaacggattatttttatctcagcgccagtaccaataccattatcaaaacaaaacttagcgttatatccggtaggattgttaattgtagccccttctagctctacagcgtcaacagccacagtcggttttagatatccggatttagacaccttgcaattgacggattgaacagtggtgatctcagcatccgtaaactcttcaggtttataggctacggcccactgaggattgcctgttgatgggtgacggccaatctctttccaacgcctcatattgttcacgtagataacaaggccatcaatagcaaaatcttgactccaactatcaaataactctttaaggaatgaggcgttcaaaaagctggcaaatgtatgaagtattcttgccacataaacaaaatatgcttccatgtggtcaaggagatctatataagaaaattatcaaccccttctccaaaggctccgtatcgcataaaatacacgtgtttaagtaattccgaaggcggatcgtctcgcctaaataacccagccacggtgttcctcgcagatttatatggttgaccgttcaatggatttatcttaccttcgaaattatctttccatattgattttgggataatagcctcgccaaaggtatattcaacaggagcattgtcatgatgccatacagaagacattagatccatatgtcgcttacagtccatcccttcattgtcattaccacctctggaatatgtcatccagtcattctcattgcataacaagctaataccatcatattttggagtgataaccacatcgtcatttggtcctataccaactttatcgaaccacagacatagctcctcaaaagtcttcactttatccaacgatctcatcgggaacggcagttttactttccgatccacaatatccattcccggttccacctttttaaaccactcatgatccggattgatggatcttaactcatcaaccaatatgtcataagcaaagtctgtcatgataggagtaccttgccggtactccttatttgctcttacgattttatcgtagatttgttgttcaatattgttcatctgattatctttgtactcataatataaaatgtatcatggaaaacaaattgtttgattatttcaaggattcaggtaaactctatgggctaagtggcgatcagttggttaaattccaacaagcatgcaacaaagctgtatgtgacaaccctactttagattttaatgatcttctgatagtctgtcaagtttacctaaacactataagagattttccagatatggttatttaaacgatatgctctttgctattttttctatagccattcgtatcttgtgttcaataatctcagcggtatcatcactttgcgtattgataactatgagattcccgatcaataaagaaatgttgactaaaactgttttatcgtttcctttttgattgttcattttgattgattgtttttaattgcatgtcttagtttttgaccataagatctattatctctctggtgatgttggttctcaatccggtaaagaagctctcctttggttcgcaagttttccatagcgatcttcttcatcttcttatcatctccagtgagaacacgatcgtatgcctcgtccaaagcatatttaaaacttttgataaacgctcctctataactagatgacaatctatcatagatatagttgaaagatttgataagatccaaattgtcgaatttcttatcaaagatcagctggcggatgcgttgagcggatctttctcctcctccagtataaaactccacaatttgattttccatcaaatgatccaattgctccggagttgcgttttcagaaatatatgctccatgtttccggatagcaggaaggatttccttagcaatcttctttctgaacgcttttgctgtttctgattttgccaccatagctaattcataaaaatctgattctaagataaataaatctaacccaacttcttgggtcaaatatctatcatctatttccgacaaatatttcttaatattgtcccatcgaattgttttggttatgtttccattccgttccctctctctttcaaaaccaagcccaattgctacatctttcaagtttagaaaaatttctccacctatcatttgttggtaattaataccatcaatcatttctgttactacattttgaatttgtttgttcatgattacttttgtgatttttgactattggacataaaaactttaccattcttatcggttcccactggatgaaatgtggttgttcctctatcgtgcatctggatagctaatcttgcgtcccatatatccttccaattttcaattgaataccccatgaatctgtgctggttctcaaatttaaattctacattatataataattcgttagtagtgagatcaagtaccttaccaacacgcatttttactattttcattttgtattaatcgttattccgttcgttatgaggctgccattatacaaacagggccttatgtattccagtgtttcaaaattcttcaagaaatcatctatcgctcttacgaacatcctttgctctaatggatctgtaggagcatcctcacgtttatagataacgcaatcttcccatgctccattttccattttctgtcttcctatatttattacgacatataaatgatgcttgtaataataagtgttgttttcttttaattcgtatttttccattttgtgatagtttttagtgtccaccaatccgaaaaggaaaggtggacgtggttattattaagcttctactaattcttctactctttcttcccaaagctggtggatcaatgttcgtccctcatgattccatcgaataattgacttgaacggagaaggtgacaataaggtttgatgctcatctgttactttccagctaccggatttccctgtcaatactcccttcttacataagaattgattcaatacttgagatgtcgttctcaattccgtagcgatagtcgtagtagtaaagtaatctcgattctctaccataccagagtaatattccaccttcggcttatcctcttcgatcttggcttcctgttcctctaccttttgttgtagatgagcggatagaagaagagcatcagagaatttctgaggaatcggaaatcctccaaaattaacgttaccatgatcgaaaggaattgcagatataaatccactcgttctcaagttgttaaaggtgtaatattggatgacagatctaggttgatcgacttgtatgaggcgtgcgtacaacaagacgctcatataaggagtgttttagagacgttggaatcccaaattattggggaaaggtatatgctggcaaggcaaaacgccaatggtcaatatgtccgtgatgtagaagctacgaagaaaatacaagggagtcaattcatcaagatcatcaagggtattgccgaatctaaattgtacggttatacgctgattgagattaaccctacaaccgatcctattacgggtaaattgaatgacgtaaatctcatcgaacgccgcaatgtgttgcctgaacaaaagaccgtattgaaacgtcaaggtatatggcttcctaattgggatcttgaggctcctaaatataagaagaattatatccttataaactctggtgatctaggcttgttctctgccactactccattgattctcgccaagaaattcacgttggctaactatataaattttagccatacatatggacaacctattatacatggtaaatcggagagtgagaatcttggagatcgaaatagactagccaacgatatcgcctcagccgccaccaatcgtgtcatcgtaaccggattgaatgatgatatcgatgtcaaagcgtttactatgtccaatagcgagaagatttatacgagccttatcgagctggtcaacgccgaggtttcaaatttaatactaggttctgagtctatggctggggcgacacaatcctatgttgggtcaacaaaagcccatcaagatattttccgagatcgcatcaaggtttaccgggaatatatcgagaacgccatgaacgaggagattatcccacgactagtagctatgggatatatagatgacgggttggagtttaaatattccggagggttggagatgagcgttgatagcaagatagatctctatgattttctctcggataagtatgagatagagccagaagagatcgccaaggaatttggtgttgttgtaaagaaacaatttaataatcccgctggatggaatgatataaatgatgatggtaaggtcgacggcaaggataacgtagtttcaggtggatcaacggggattgtcgcccccacgcccagaagacgttataggagaagaagtagcggtagtgtagcgaactatttacgggaggtcatgaatggaagacgagatatttgatgagactaaagtcgatgataggacagataaggaatacgagtatttattatttctattcgaacaattgttagataaattcgataaccaaaccatagatcttgaggaatttcaagagatcgttgaagctagggtcatgttcgctttcgggcattgcgtaaggagatttggcatagaccttaacgaggcgttagatatagtgaggaatcatgatgagtcatacttgaccccttttgagatcgaaaaaagaaaggctcttgttgccgctttagacaatcttgtcgatttcgctaccgcagaggagacacaaatgtacatggacatggaagaacaaaatgacgatgatgaccctgagaggattttccacctatacaataatatatacgctacaacggagaacagggatatagactatgcctcatccatagcggcgtggtgggtgaacctgccagaggagacaaccttaatgtatatgacacaaggggatgagcgtgtacgtgattcccatcgtgccctggaggggttgagttttccgaaatcctgttttcccgaatggtcgatccctcctattgattggcgatgtaggtgttaccttgtagagtccttcactagacctaattacatggatattcaggatatcgattccttgataggtaacgccgtaaatcctatattcaagcgaagcctagcgaaaggtggtcccatatttggtgaagaccatccttattttacggtagacaagaggtttatacagcctatgaagaccatatcatccaatatcctcaaatccgcaactacgcgcctaatatgatacagaagcgaaaagaatctgcatcgttagtaaaaagggggcacagtgcatcgaatgtcaccataaagacatataaatgccccttaccccaccatgcgacttgaggcaatacgcaaaatcacgactataagttgtcggtgttatccaaagtcattctggaacacattggcataagcattgttgcatgaatagatattcagcacatacttccttgatgtcctgacccatttggctggcacagagatgaacttaaagacaaacgtcttgatgcggcttgttgctttgagtccgaacctcttcacgtcaagcctcgccatgatgaatttatagaagttgcgtatgagtgccataagcagaagaaacaccgtgttttctcccataaaggattttggaagcctgttccagccgaatccgttattcatatcatcgaagatgcgttccttccctccacggaggttatagaattcgacaatctctttctcggaagactcgtagtcatttgtaaggatgcagcggtaggtgtattctccttcccacaggtcgagttcgccgtctatccgcttctgtctttgaatcacaagacggtatgccttccctttccatttctcgatgagaatggaggccagctcaaactcaatgccgcccaattccactttcttccaacctctgagggcaaagatgtcattgtagagcgaactgcatcggttagcacggatatagaaggtcttgcagtgtttagcaatctcttccactatctcttcagaacacgagccgcaatcagctctgaaacggttgataataagcttgttttgttcaaacctttcaaagaacctcttcagcgtgtccttctggtggaaacggacatttgtgttgccgtcgctgttctcaatgccgacaatcaagttgccaataaccgccacgccagggcgataaccaaggaacttcttgtatgtaggcttcgcatcaaacttctcagcctctatgaactggtggtcgaagtcaacgtcatacccctcgccctctttcagctgccctgtggacaataggcaattgaggagcagtgtattcagcttgtctgccgtgttgaagtcgtaggtcttgccagtgtcggatgtgtaggaaatgttatcctgggtcagttcctttatggctctaagaatcgtgtcggcactgcatgtgcgaagtgtcggatgaagcgaaaggtggtacatcagatgagtggtgacatcctcgatgcatgagccgccacaaaaataaacgctcataagcgaacggatgatttcgctgtattgataaccatacagcctgcatctcataccgagggttgagtcgattacagatgagagtctggagtcaaattgctccattattgaaaatattcctccaaaaggagtgagtttctcggatttaattgctacctttgccatgtctgtcgggtttgatacatattttgatttgcaacactaagataggtgaaaaatctgacatggcaaattcctgagcaactttttgttgctcaggtacttaaaaagttatatttgtaatagtgttgcggaattaaggaatattaaatccaaatataatatcgtatgagtgaaagtgccgacattaccttccaagacacgttaaatcaatggaagttagcacccagcaagttcgccgccaactattacaaaacaaagattgagataggggaaacttatgtcagggaatttaaaaaatcgtttgacttgaaaaaaatccccgggacaggaagatattggagaaaccggaaacgagattatccgcatccgatattgaatgagacaggaaccctcaaagaatctatcacatatagccttcttgagggatcggggttgcaaatatatacagatgagactaagttcccggtaggaaggcgtaagagcggaagcaagagttacgcagcttttcataacgcaccggacgatacctatccacctaatatacaacgtcaatttataggcgattccccattgatcgagcttaaagtataaaccatattatataatcttttaaaaagcatcatatgatcaaacgatatatatcaaatagacaaatcgcagaagatacagatgatactcaagaccccatagatcctacggacaacacgaatacgttaggcgatgtttttcaggccataaaaagagccatactaactgtcaaggaggaagaaaataacgatgacagccctcccctattcaaaaccgtggcgatagataccggtcagttcgagagggtcatgagtaaggtaaataccgagtacgagacagctttccccgcttgttttgtaagattcacgaacgttcattttttggtggcccagcaacgtatcggggaaggtcgtggtatcattcgcataagatttatccttaacaaactggataaccaacatgtgaattgggaaacttacccattttatatagcggaaagactaaacaaggccattcaggatgcgaaaaaagtagaggaagctcttcaggaacgatgtaacctaatgtattttgacacgccacaatccaccaatatgcttcaagcttactggcttgattacgagatatattttaaaataacatcgagttataaatatgcggattggatcaagaagaaagttattacccctccgttcaccaaccatgacgatgtacctaacgacaaacctaacgtggaaaggcccacatatgacgaatcatcaacattcaacgatcttattgtcaacgcaaagtctatccagataatgccgaacaacaataggttggccgtaggcgagcagatggtactatcagtggttttcttcccagacaataccactgataaaaagataacatatgagtcccttaatgactcaatagctaccgttaacacgaatggggttgttaccggaatacaaccggggatggtaaaagtggctgttgagacctctaacgggataagagcatacaaggatattgttgtgtatttaaaactagggaaatgaacaaaaagacgaaacaatcaagcagctggtattcaataaataaggcacccaataccacaaataaagaaaactggtacaccataaagcctgtatctgttcaacctatgagcgctaggctcgttagtgttcgaaaccttgaggcaaacgaaaagtcaaacgaaataataagacataccgacgagttcattgacgaggcgaagatctacaacagtataaccaatgtcatagtggagaaccagcatctcattatcacgttctcaagcggactcacgttcgattgcggggtcgtaagtggtgactaccctatattaagaagtaccgagaagggaatcgagatgaaatataatagggaaccagacagtgccttcaaggttatcgtgccatcagaatcgataaagatcaattttgacaaactaacacaagatcaaaaggagttcttggcaatcaatacatgtaactatttaataaaaaacatgacgatcgatgacaatggtcatctaatcataaatatcaaataatcaaaaatatggcaatagtagatttaggcaaaatcacattcgtcaataaaggcgcatggaacaaagcgacaaactatgagataaaagatattatatcatacaacggaagttcttgggcaagcttgaagaacggaaacatcggcaatgagccaaaagagggcgttaattggacattaatggtaaaatccacgtaccaagcctggcttgaacaaggaaaccagggaaccgaggaggaatttcttaactctatggctcatatccaggctaattgggaacaagcggataagggagccaaggattacataaaaaataaacccgacaagtttgaacccaaggaacatagtcatacaaaggcacaaatcgtggatttccctacatcaatacccgcagatggaggaaatgcggaaacagtcaatgggcataccgtagaatctaatgttcctgccaacgctaagtttaccgatacgatttatgacgattctgagatcaagtaacaaataaaatcaacccttgaagaatccaagcaatatacgaacgagcaaatcggttgtatagtaggatttgatacatcgatcgtacaaaccttacctagttctggtgtaaagggaattatctatcttgttcctaaaggtgatggaaaagataagaatatccatgatgaatatatttgggtaaatggaaaatttgagctgatcggaaatacatccgttgatttgtcaaaatacagcacaaccgagcaaaacgacatcaagtacgtagcgaaagtgccaggaaaacagctcagctctaacgattataccacggaagagaaaaataagctaagcggtatccaagaaggagcagaggttaatgtaaatcctgactgggatgctacatttggaaaatcaatgatcatcaacaaacccactatccctgtagttgatgtaaacaagaaatatgtagatgacagcctattaaagaaagctgaccttatcagcggcaaggttccattatcccagttgccagagattccatctcagataaccattgacagtgagctaagctcgactagcttaaatcctgtacaaaataaggttataaatgcagccttagaacacaaggttgacaaggtagcgggaaaagggttaagtactgaggattataccacggctgagaaaaacaaacttagagatatagctcctaacgcagaagccaacgtcaaccccgactggaatgcaacatctggtaagtcacaaatccttaacaagccaaccattccaacagtagatgtaacaaaggcttatgttgataatgcgttaaccacaaaagcggatcttgtgaacggaaaggtcccgttatcccaattacccgagatcccgtcttcgataaccattgatagctcattaagctcgacaagtacgaatcccgtacaaaacaaggttataaatacagcgttggggaacaaggtcgataaggtacccggaaaaggattaagcgctaatgattatactacaaccgaaaaaaataaactatcaagaattgaatagatcgtagacgaaccacccctaatagaatatgaagaggataggattaaattttctacgcatcgaatatcccctagtactggagggagcactagcggttcatcttatattaatggagcaagctactctaaacctggactaatgacagtctcggataaaaataagttagatagtatagctacaggtgcaaacaaatacattcaccctacgacatcaggtaataaacatatcccagcaggaggaacgtcaggcaatatacttcgttggggttccgatggtacagccgtatggggaaaagaggtgatgtcagagagcgataagaaaaaactagagcaagtaaaaattatagtttctttcagtcatacgttcgagaatcttacggaaacatctaccgcagatgatattaaagcagagtttaaaaaagtaaatttttcagacattgacgtatcgagtgatgaggggttaatgtatgttcttatcgcacatggattagcttatggtgacgatcaatccataaataccaatgatcaaatttttatcggtaataaatcatgtctcgtaaacggtagttatatagaagagggcacgaaaacgacagctaccttagaactatcttatatccacaacccaggaaaacttcgcaccacaataatgacgggtacaatagatgaaacgaatacatatgccttttcttgcaaggttacggaaagcggggacgatgagtattatctaccttacgatcttgccacgatcacaagcacagaatcaaaggagaatatcttgagcaaacttggagggagtgaaggtgtgaaaaagatttccgacgcaataaataaaggaaaaaaatcttcatcgaaagttatggtgtggttggcaaaatccctgtgtcctctcttaactttattattcaatcttggatatcatacgctgttcccacaacaacaaatgaaggtacaaacttgatatatgtaaaagtctcttctaatccggaagtgaagatcgttcatacctacggttataagcttcccgtagaattttttgcgttacaaagttcctccaccagcgatgagatcagcacgaccataggcggtgaagagggattgaaaaaaatcgtcaaggcggcccaagacgggaatcgcttttggatagaaataaacaaaggtgatttagcatccattcagcgtgtcgatctgatggtagtcacctgctatagggacaatagtgccggagatatgtctatcggctttttcgggaaaatggcgtacctgtggggaggtatggggggaatcattttaatttcatacataaaatcatccaataccttcacaattgatatattggaagcataacctttccctcattaaaaaacatctatcgaagaaaggaaaaacaactagggatataagaatcttttctctggaacgacggtgtatttgtggggtggtataagaggaagcattatatctatcctatacaaagcccaccaacacttttgaggtagatacctaattcagatactaagatctcaagtctaaaaaagaaatgtgctctcattgtaaaatccgaggaaagcacattaataaagtttattttttctcagaatcattcgaatcactccctcttttctttataggttaagaagagagggagtatcgttgattttattttcccaaaagataattctaacagattggtataatttattcgataatcaattccccttcattactgttgggataatacttgcgtccggtaagtcggttcccagcaacttcttctgatttgtctacaccattcagagcgcttttcaacgttccagtaaaattacactttcgaagagtcaccttaccagcgcttgagttcatccatacgccagcgataccaccaatttccaattgatcgccagcatcgttggcgttgaccagtgttacatttcccgtacaaatgcagttttcaaaagtgtttccatagtgagcgataccagtaatgccacctacatcacaagtcgatccggttacgttaatatttgattcaacattggaaataatgatattgccttcacccataaagcctatcacgcctcccacataggtacggtaggtttcgctttcagccttcacatagctgccttcgttcacacgcaccgtcagattttccatgcctttataaacattcttaccgaacataccaccaacataactatagccttcaaccttcacgtctcctgccagcgtaatattggaataagaagaagtataaggtgtacccgcaatagccccaacatctataccagctttaacgaacgcattataaagagtgaagttcatgacctttccatcagatgtaaacccgaacagccccatatcagcattcgaagatgaattattcacccctctctcaatctttagattactgatcgtataaccgcaaccatcaaaagttccttggaaagctttatcttttcttccaatcggtgtccactcctcactcttcaaatcaatatcattagataacttaatctgcataccagagaaagtcgtgccaccattaacttcagtggcgagagcacgcaactgttccaccgtagagatgaaatagataatcgtacccttataaccggacccttttgcaactttcaccgctaaatctccatagatctccacgttacctctattaacagtaagattctctaccttgactccttcgggaatgatcaaggtattatcggcagttgtagcagtcaccgtcgtgtagctttcgccgttcaatgtcaccgttgagttcggaaggttaattgtcagattactcgttgtcggagcggtgatagtaacttccttcggggcagattgaacctcttgagtatcttcttcaatcgtgatcgcagccgtcgtcgccgggatggagatagagactgctgtctcgttgtcttgctcgaataccttcgggatcgtgatggtagcatcctttttcggagcctcagttacgatcacctcggtagctccactttggatcgcctcgtccacttgatctaccgtggttacctgtttggtctttacctcctgattatgacttccatcataatcaggtacaatcgtaacattgaaattgccagtggcggtaagaaggctaccgtagatattggtacggtagttccattgaaccggaacattctccaccttcagtccctccccgttgatatccttaatctttaaggtagcggagttcaacatggcttgatcttttccggcattcgggttctctccctcggcgggcaccaagaaataggccgtacccaagtagttatacgttttcgcgtcgggagcggaacccatcgtgaccgtctccgataacgcaggaatcgccgcttcgccaaaaatcacctctgcctccgtgaaaccacccaccgtgttggtgaaggggttcaaggtagtagccaccttggagagggtgatggaagagtgcgtgttctcgtcaatggtcagcccgtttttacctgcgtcagcgatatcgtccgtaaggaagttgatctgagcgaagggacgttttaatgtcacgttctcctcaaaagaagcctcgaccgccttattttttactacaccaaggaaagcgtcacgactctcatcgttggcctttgcatcattatagtcaacggtgatggtcttaccatcaactccaaacgaataagggctattctccttattaacgcttgcccagaagagaaaactataagtcttacccttcacaagattaatagagacagatttttttttctcattaagctctaccgtcttgtctaattcactcagataggttccgttctcatcgaacacatggacggtcaaattcttcgccgtcgttccatcgctaatcgccttgttctgcataccgccggacagctcgacgttgaaggagaccagcgcctcgttgccatttccttgcgacagctcgtcatcgctggaacaggccgataacagcaacaatgccattgccgccatcattgaataaaaacatcgtttcattcgcttagtcgttttaaattaattaatattgttatttaatctctatgtcaaattttccatcgaaagaggaatcgatctgcacgttaccagaagatcgtgtggtgagaaaattacccctaaccgtggtgagtctgcctctttggagcggcaccttgataccatcgataccggagagtcgcttgccgttctcatcatgacaagccacggttacgctcacgccagcgtcaccctctcccactatcacgtagtcgaaacccataatggcctcaccatcctttatatcagtcaagaccgaggggaacgacactcctgttcgcacatccaccggtcgatccgtgtgcatattgtatgtagagggcatgaaaccatcatacaagaatacgatccggaacttggtcatatcaatcgcatccttcaactcatccttccctgggatggcattttgcaagatagacctcaaataatactccttgaactcctcaacatccgtggtcacgaaacggaatttcgccaatggacggcacatgctgaccgttagtttctgacgacctccatctgtgcttgtatataatcctgtctctaaaacaccccgaaaagcatctcgaaaatcattgttccccgcatgttcaccccgtaactcgatcgaggcgaaatcttccgtatcataaaaaagatcgctcttgccgcctggctcaacgaagtctgtccacgccataaaacgataatcaccctctggcaaatcaagggtcattcgataccccaaggactctatctccgcatgactaaacgagagcgtttgacaagggatggtctcgaaaagactatcgacccccatccgaaaaacacgaacttggtaacgggtctcatatgaaggcaaatccgcggcccgagtcgcaccgacaacgatagttttataatctggaagctctgcccgatctgaggtgaaatccaaccgaagctctaccgatacatgatccggttttggaggttccgaagtttcatccggccactcatgcacgtcacaagcgaacaagaatagggataggaggatcataaaaaaaggatatatggaaaaaagtctcatgactcacctcctctcccaaatgtataagtaattgaaatatttacctgatcgattccgaaaaaggtcttctggcggctttccaccaaggctccgttcgactcgtttcgaaacttgtcataatgcaagcgataacatccagcacccaacgagaactccatcccccagcgacgggccgctccgatcggcatccggtatcccaccgataccccacctcccaaagcaggtgtagagccgtccttatcttgatagcgccatcgcctgttataggcgaaattccatgatgccacccccagatgtacgccaccgaaacatcctttcaataagggggtccagtaacgaaactctggttgcgtacccaagatacgaaacttcgtatgtgacgaaaaataattggtaccagagtaataaaaggggatatgcaaggaaaaacgatcaccgaatcccaattctaccccggcgttagcgatcagcatacccaacgccatggcgttagtcttcaccgtaacggatatcttattatccgaaagagagtcctttcctaagggcatgccttgagcatgagctaaagtcatcgacaagcaggttagtaaaaaatatacaaaaatttttttcatcccaacatattttatcaccttccatttctccgattcattctatctaagatggaacagaaaaatattctccaaacatattgtagattgcaaaaatacaaattaacacttttacccccatgttttaacaaaagttaaccaacttttattatcaactgtttccaaacatgatctatacgcccaaaaagaagatacgggaagatcaaaaaacatatttcttataccctatctattcttttgtaaaatgacgtaaaaacaaaaccaatgaacacatctaaatttaagtatgtagttggagaagcgaaagagaacgaggtttgtgacatccgattgttttgtgatatcgatgaatataccgcaaattcattcaattcggaatttttatgggttgagagttatatcaaaccaagtaagatcagggtcttaatcaacagctctggtggttccgtgctttatggtatgagtatcttctctgtaattcgtaactcctctataccgacggaatgtataaatgaaggcttggccgcctccatgggatctattgtctgggccgctggagacaaatcgttaatgagggactacgctatccttatgatccataatcccttcgactcaacggaggataacaaagacacagaaggggagccagactacgtaaaagcgttcaggcaacagatagagatgatctacatgaaacgatggggatttaacaagaccaaggtaaaagaactcatgtctggcaaagaaggtaccgatggtactttttttacagctgaagaggcggtaaaagctggtatcatcccagttgagaacgtactaaagacctcgaaacaaaaaatcgagaaagtcaagaacacaatagagggtattacggacaaccaccttctcaaggacaccataacctctatatgtggggagctatcgtcaaatggatctgataacaaggaaaataaacattctatcaatgatgtctctaatcttaataaaaacaaacaagaacctacggaagtagagaacaaaaccaaaacaaacaatatggatacaggacaaactatcgattttaattttggtgctgtcgtagcttcgcttggtttcaaggaaaaagtcgaggttccacaggtcatggctcggatcaccgagctggtcaacgtagagaacaagctcaacgaggccaaccagaccattgactccttgaagatcgagaaagccggtgaggtcaccaaaaatcaaaacttaacgaaagagctggaaaacgtaaaagcggaactacaagcttacaaggatgccgagaaaaaggctatgagccaaaagatcgagtctatggttcaagacgcaatcaacgctggcaagatcgaggattccgctaagcagaattggatcgatatggcaacgaagaatttcgatttggctaaagcgacgttagattctatcccagccagagacaagatctccactgagatcgagaacgacaaggacaacgtggagaaagtgaaagatagcgtgcaaacagtagaagctcaaatggctaaacaagtcgaggctgttgttggtaaggatttcactttcggatcgcttaagtaataataaccaaaaccttaacaattaatttatggcaagtgtaagttttgctcaaaacacatatgcgggtgaggtcctagaggatttattgacctacaccgcacaaggtaacgatacctataaagaagggttgattcatatcaagagcggtatccagtacaaatacacccttccatccgtaagcttgggtgacatcatccaagacaacaagcctacgccgacaagccctacggattccaaaggaacatatacgttccgtgaacgttatctggaaccgaaggatttcatggtctacctagagttcaatcctcgtgacttcgagaaatactggaagttcgctcaaccggatggtaatctggtattccgtgagcttgatccgaaagtacaggcgacgatgttgcgattattgatggacaagaagaacgctttcatcggagacgctatttggcaatcagtcaagggtggaacgtctggcgcagatggctcattcacaaaacctgaaaacggaattgatcttggttccggttcttataagtattttgatggggctatttatcgcatattaaagaacttaaaggagaacgtgagcggcgagaccgtaattaacgctggtgacacagagttgaagactggcgagaacatagaatccgccatgtacacgatgtggcaaaaatgcccttaccaaatcagaaagaacaatttggtttatatcatggactgggcctcttgggacttgtatgatcaatacgtgacctcaaaacaattcaagtacaatgacaatacccaagtcaacaaatacatgttcaagggtaaaagaatcgttcctatcgtaggaatcccggagagcacgatcgttcttggtaatttcagtactggaatggactctaacttgtggatgggtgtcgattacgctaacgatacggaggtattgaagatcgacagattacaagccaactccgagttatacttcttccagatgagaatgaagatggacgttaatattgttcgtccagcagagattgtcgtttggacagcttacaaattaacttaaaaaataacccaataatcaataaaaaaggggcgaggccaagcctcgctcctttttttatacacataaatatggcaagaatcaagaaagaaacagagtcacctattgaggagtttatcaacgaacctgtagaggaacaagataacgaacttgtcactccagcacctcaagttattcccgacaacattgacaggatattgaagatgtatcctggatatgagaaactttatatagacagcaagggcggggcttatacaagccaacaaccaaacgctcacttatacgaaaacccctattataacaagtaagacatggcaataggaacagtatctttcatcagaaaagatggcaatctcacgccaacctctgttggcaacgatcatatcagcgggttgatattcgacctaccagtcgaaaccaatatgccacccagcataaagatcggtgacgtgatccagttattttccgttaatgaggcgataggattaggtatcactgaatttgagcaagaaaaaaacaacttcttttacggtatcccttattttcacatctcggagttcttccgtatgaaaccggacggatcgttgtacgtgatgttcgccgattgttctaagaactggaacgctatcaagaccatccaatccgtagcgaatggagacatcaagcaactgggaatatggacacctcaaaacatttggtccacagcgtccagctcagaggatgactattcgctcaaccttgtttccgatatcaatacggtagcggaggaattagctaacgagcatcgcccgttatcagtattgttaacgggtaacgcctcttcagcagactccaccggggcagtcaaaaccatcgacctcaaaaagatcccgtcctgcataggcgatttcccgcgtgtgacagcgttgttaggtcaaggtagatcggatttgttaagacagatgcaaatcgctaatccgaaacattcctctatcggttgcgttggtgtcgcattaggttgcgtagccgaagcaaaggtttgcgagtctattgcttgggttaaccaattcaacctaacctccaaacatatgagcgatatcgagttcggctttggcaatatcgagctaaatgacacaggggatgattttatcagcatgctacaatttgaagcgttatctccagcccaaatcgacgagatagaggaaaaaggatatgttttcccgatcaaatacgccgggagagcgaacggcacctatttctccaaggacaggacttgctcagatagcgattataggactatcgccagaaacaggaccatagacaaatcaagacgtgcgatcagaaacgctctccttccttacttaaactcaccggtattggtaaatccaaagacaggatatctagcagagatagagataaaaaaataccagaatgttgtcaagaacatcctaagcacgatggaaggcaatagcgagatctctggatacagcgtgttagtctcctccaaccagaacattctattgactgacaccttaaaaataacatacgcaatcgttccagtcggcgtgacatcgaaaatcattgttgaggaaggattcgctttaactaacgcttaaaaacaacaaatatggcagatagtacaacaccgcttattaatgggcgtgcttatgactggtccatgatcgagatcaatttcgggttcgcctcatcgtccgaagcgatctacggaatcaaggcagtcaaatgggaacggaaaagaaaggttgagtctaattacggtataggttcacaacccatctcacgaggttatggaaactggacgtacacggcttctatcgagcttgattacgccacccaagtgatgttccaagaggcttctccggatggtacgttgatgggacttggagagttcgacttgatcgttcatttcgctcatccagatgacggacgaaccgtgaccaccaccttacagaaatgtatcttctccgaggatggaatggaagcgaaacaagatgataccgatctttccaaggagttcgatcttaatccgggaggaatcgatacattaaccacataaaacatttataagccaaagggccgtgtgaaaaataacacatggcccttttttacattaaacaattccatcactgaccttctattctttcataaacaacaaaaaagacaaattttatggaaacagaagaaagcaaagagcttacattagctcaagaagaaactatcaagaaaaccttagaggaaatcagaaaacaagatcccaagaaaaacaaaagaatctaccctatcgtggtgttcggcgacgaatacgatgacaaggatgtgtatatcgcttatttcagagagccggatttcatcgcgttcagtaagttcgtacaattgcaaaagaaagacgaaatcgcagctgtccgatcattggcgcatgacacgtttatccaaggagataaggaactggtggatgatgattccttgttcttgtatggcctgtccacaaaactggtcaatatcattggttcccgccaagccaaggtcgcaaatttctcgatcgctggcaagtaagggatgacgagtggctaaggcaacatatagcccttgtccgtcattactttcccagcgtagaactatccactatttcagatgaagatttcgcattgatcgccaacgatgctttgtggttgcataagcaagtcttaaccacatcatctgttaggcttttttcttaactactttatatactcctctctaaacccctgccgacatgatgtcagtaggggttttcttttttaatcaagtctttacgcttcaagctattctttattaagtaaacaataaccaaagcctataacatggattacaacgtcaggtacaacatagacatcaacggggcacaagcttctaaaagtatcagtgatttccaaaacacgatacagaaaaccatccctcccatcatatcaagtttagaaaccttgagaaaggaactgggaaagatcaactccgctttcgtcaattttaacaggatcattggcaccaaacccaagaagataaaatatactattgacggtagtataaaaaaagagctaaaatcccttcaatcccagatcaatgctataaaagggaaaactgtcaccatcaacacaaaaatcaatcaaacgaccagcaccacgacaggatcaataatctctaccccgagagggaatagtagggattatgtccctaaaaatggtaataacagggtcgcccgtggttttgggaacggagcgaggggattgttcggaatggctgacgtaatgtatgccgctggtttcccgttccctaacatgatcggagcagccgctataggtatgggggccatgagcatcacgaaagatgctgccgagtatgagaatatcatgacaaccgtacggagtatcctgaaagccacggataacgctatcaccacgtttaaccagagattttccgatatgtcaaggaatatccgcaaggttggtgtcgataccaagtttaccaccacggaagtagctggggcggccaaataccttggtatggcgggtttgaatattgaggatatcaacaactctataaaacctatcgccaacctcgctattatcggcgacgctcctcttgacaggatggcagatatcgtgactaacatccagacagcctacgggttggatagctctaaaatgccacagatagcggatgtcctcacgagtatcaccaccagcacgaataccaatgtattggaaatgggcgaagccatgaaatttgcggcccctatgatgagtatggctaagatatccttcaacgaggctacggctgctattggcgcactagcaaacgctggattgaaaggtacggtagcgggtacagcgttacgggcaatgatgacaagattattgaatcctacaaaaaaggaaccgaggtcttgaaaaaatataatatccaattatatgagttagataaagcaacaggaaaaaccaagttaaagtcattgttcgatatcttctcacaactcaaagctaacgatgccagtatacaggacctgaccaggctattcgataagatcggaggaaacgcagccaacaacgtgttcgccgagttgatgaaactcccagaattgatacaaaactctgtctatgccgccggcctatcggatcgtatcgcatctgagaagcaagaaacgatcaagggtaaatgggataaagtcacgtcacaattcacggagactgggatgaacgtgttcgaggcttacagtcccgttatcaaggaagggctggataatttggtcttattgttacaacaatctggtacagccaagatgctcaaggatatagcatcaggattgatcgcaataacagaaggcttgatcaatgtgtccacatgggtatcaaaaaactggtattggctggaacattttgtagttggaggcgtattattaaagaagatatcaaatatagtagcctacataacctccatgacaaaaggtcttcttgataccgccaaggcaactggggtattaacaaccgccataagcggaggatcaggagcgaccgctggaggtggtttgttagcggctatcggaggaatacccgccatagtcacagcggcagttaccgccctagcgtctttaggaataagcatgtatggagccgggaaaacgacacaatccgtaagcaaggctatagagaaagaatacgagaacctattgccaatattcaaggataaagataacgataataacagcgcaagcggaaagaacaatataaagaaaatcttgtcagggacagaatattatgattcattgggatacgatctaggaacgatgaatatgctgttcaatggcgaaagtagcgtttatccgcaatacatgagagccatgtccgagagaggtcaattagaaggctcaaaaatagccaaccaatacctcatggcctctatcggtatggagaacttaggcaaggataagatcaaatcgatctacactaaccttatcgatgacatggcaagccaaaaaagggcttaccaatatagcttcggtccttttgccaaccttaccgaagaggaaagatcaagaggggtatctgtattgaatagtatcaatcaacttaacgctgacacggaagccaagaccaagcaattcaccgaggccatgaataaatccatagacttgggtattgactctttaagcgaactgatgaacctccaaataaagatcgccagcggtctacctataagcgaaaacgaatcaatcaatctcataaagaacctaacaggttatgaccttagccaaaaaggtctagggtatcatgtaatagcgccttccggagatatcgtgtacgaggataaggaaggtgccgcaacaaccgccagatccgtgatgtcctccctcagaaaacttggtgcgaaaggatggtttttgaatccattgatctcggcgttaggggagatcaaagaattatttaacatgtccgaactccagaccacaaaggatatcaggacagaaggagacttaagtgagggcgatatagggtatggaggagcttacagtggtgtaggaaaaaccaaagggacacaacccaaagtgatcactatcaatatccaatccctcatcggtagcgtgaacataaactcaaccaacggggaagatatggaaaccctcaaggacaaagtgacacaagtactcatagacgcaataaaggattttgaaatatcatataactaatggaaaaactaaatatcataggttcaccgatcagggagcctcaaaataacaagcctaggatattcgcaaacgtgaccggtgaattgtcaaagaaaaccttgccttccctggctccaagggattataaggggtatgccatcaaacgggttatcggtgagttatacaagggtaaggacccatcgtcacttcttacatacatcccccgaatcaaccttatagaccgaacaagaaaccccaaggcgtatctccagaaaaaagcgaggatcgtagagcgtatagtcacctggagaacaaaacaagcggtgttaaggatggcggatgagatcgtcaatggttcacctgactataagcttcaaaccaggtataatctcaccgatagagatagcaatatcaagaaactagtagaagctaatacacctgtaaatctactgcaagagaaaggtctggatggaagtcctatcaggcattacatacagctccaagttaaagacgaaggtgagaactatacgttttttgacggacacgctatcatcaagatctctgagcgaaaaaatatcctgctgaccaaggtacaaagccgagacctcacccgtaaggaatacatatcagggggagattataatattaccatcagcggcaaaatagtcagtccctaccaagatgtatacccgacaaaagaggtcatggacttgatcaagatattgaaacataaggacgtgataacatgtcaatccccatatctcgatatgttcgagattagcaccattcttatactatcctatgacctccctcaagcaatcggtttctcaaacgtacagaactatacgattaacgccgtgtttgagagaaatacggaagcgttaaagttcgaggagaaagaaaaacaggagatattatctgcaaagcaggtaatgcaagaagaaatcgccaaacgtgaggcttggttagccgccaacccggagcaagtcgtttccaaggccagcctaaaagattacctgcgtaagttcaaccccaaacaatttattcaattacaaaactggatataatggaaatacatggcttaagcatgctgaattgccttatcacgattggagacgaagatcctaacgacacactgcacatcttaaacaagatcactgtcaacgaggttgtaaacctccagatcaaagattcctaccagacccttatcaatacagccacggtggagttcacgagacagatcacgatcaaatcctctttgaaagacgagttcggaaccagagaggtcaaacttgtgggtgacaaggatagcttattcaaaagaggtaagcgcatcaacataaaactctgctacgggatagacgaaaacctcaaaacgatgttcgatggatatatcacttctatcatttctgggaacccattcactcttgagtgtgaggatatggggtatatattaaagcagacagccctagatccgatagagaccagcgcaaaaggtaccaagataaatgaatttgtgccgaagatactgaaaggtaccggaataaaacttcatcccagcacgaaagagatgaacatggagataggccagattatttacccgcaaagctgcacggtggccgatatattgaatcgattcaagaaatggggtatcatgtgctatatgagaaattataacggtgttcctcatctagctataggcaggacattcttctcagtcaacacctctgagtcgttactgaaagatatgccggataccccctacgatatagagtttgatgaaaacgtggcagaggataacctgtccatccacaaattagatccagcgctcatggcgttagaagctatcgccatgtacccggataactccatgtttaaagcgactatcagaagagacccaaaagacacatccaagtttcaagtgattaatgagacaaagataagcaagaaccagttaaagaacactttattatcagaatatgataaaaacaacaaccttacgaaccaatatggcggcaagaacactaaaatcgatctttctgcttataacattcgtacttttcatgaatataacgtcaaccgtaacactcttatcaagaatgcagaagcgaaattcggggagatatcccagaccggaatcgatggagatattacgatcttcggtgattttggattacaagccggatgcaaggtacgactgacggataatcttaatcccgagagaaacgggacctatgttgtaagcgaggtgataacaacttttggggtaagaggttatagacaaaaattaaagattccatacaaattaagtgataaataatggcagattataacaaactatcagaggcacttagaaggatcgtacaagctcctgagaacaatttgatgatattacatggattcgtggctaaatatacatcaggtaacaaaggggctgtaggaaccattgacttcatctccatggacggaacagtaaggatacccgagatacctataaacaccatacccggattaaccaaggggcaggtgatcgtcccaaccattaagtcagatgttacggtattatgggccgtaggtaccggaaacgcctctatattatccttctctcatatcgacacctacaacactatctcaaccaaagaggtaaatataggcgttaccagcgaaataccggacgatagcgttgattataacgagctacaggaagatggaaacaagagcgtaaccacgtataccaattcgtcaataacatctaccgtcctagacaagaccggttcagccacctcatctatcaccactgacaaaataacatccgaggtaggatcgtcaaagatggaagtcgggaaagagcaaataaaggaaagcgtaggtaattcctatgagaaactggataactccggtgttacgatagagggacagcaaatatttattggcgagggggctacagaaccggcggtattgggaacccagcttgtcaatctcatggtagagtttattacagagtgctcaaaaataaccacacctaccatgttagggactatgccgatcgttaatctcgccaatttcataccgttcctcgctaaatgtaactcattcttatcacaaaccgtaaaagtaaaataatggcaagacaaaaactaaaccaagacctagattatgggttgatagatatgcctgatcttgatatatccaacatatgcaggaacttgtacgatagtttttatagtagctgctaccataaagaaaaggcttagacatggaaatattgccttcgttcccaccgtgatcgagcaagagttcggtgggaagttcgataattatatgaccgcttactcttggggatattatatccgaaatatcatgccagaccctaataattttaagagatcaaatcatacagagattccacaagacctagtcacctccagcctagaggatagaaaaaattttcttaagggattgctcaaggaagtaaatataaagaacaacggcaagtatgagttcatgagccgatcggaaaagttcgccaatcaattagtggatatattaaggagcgtaggagccatagccactatcacgaaaagcaagggaaaaggtacggttataaaatattatgtccgcttctcttttgatccgagatttaataagatgataaaaccaaccataaccccagaacatagaagatatataagacaagtgatcgagctggacgatcctaaagaatgtagatgtataacacttgatagcgatgagcaactgtatatcacggacgattttttggtcactcacaattcatatataggtagcgcatggttggtaagcagttgtatgcggtttccaaacatacgtgccgtggtagcacgtaagaccatcaaatccctgaaagaatcaactttcataacaattaagaaagtgatgaaagaatggggattgaaagaggatgagaatttctgcataaacaacatagaaggaacgataactttctggaacgaatccgtaatcatgatgaaagaaatggctgatcttccagctgacttggatttctcccgtttcggttcgatggaagcaacgatcgtatttgttgatgaggcatccgagatatctgaaagagcggcagatgttatgttctcccgtattcgttggaaaacatcggagacattcaagacacccaagatgttcttgtcttgtaacccggcggcatgttggctgcgtgagaggttcgtgcaagatgaggaagggaaccccgtaaaatgcagggatggcgaggtatttatcagattctccatatttgataatccggatgagagctttcggcaaatatatgaggcttctttgaacaagatcaagaataacgccacaagggaacgtcttctgtatggaaactgggatttcgtagaagcgaacgccatgacgctgtataaaggtttctccggagataagcatcttgttcaaaacttaaaagaaaacgtatatgatccgatgaaaccgttgatcttagggtttgacttcaacgtatttccgcatatgacatgtgaggttgtacaaattgattgggagaataagaacgtgtattttttggaggaatttcttggaaaaccagaggacaagctaaataacacacctaagttcgcccagtatgtaaaagataagttattggaatcaaaacagatcggaggagtggtattgactgacgatcccgctggattggctagaaacacgcaaaccgaggatggcgtaaacaatttcaccattatccagtcttgcatgaataacaccatattaaggccaaaacagaacatactagccaagcaaccccctcagaagaaccgtgttgattggatcaatgagttattcgatggtctggatggatggaatatttatatcgacttaaggtgtaggaaattgaccgaggatttggtctatcagatcagaaatgaggatggaacaaagaacaagcaaaaagtcacagatcccaagacgaaggtaagatatgagaaatatggccactgttttgccgctggaacgatgataaccactaaggagggagaaatacctatagaaaatgtaaaggctggcgattacgtattgacaagggaaggatacaagaaagtaactttctcggaaataacagggaagaacgtaatggttaaggattactccataggggacacaaatatcacttgtaccccagatcatcttttctatacgatagaagatggctttgcagaaatagataagataatacaaaaaacatttgtaacatgcgagaagacgaaaaagctatccgtaaggaaatctaacgaaaggattatagataaggtctatgacatcacggtagaggatcggcatgaatttttcgctaatggtatattggttcataactgcacagatgtccttgattatatcctctgtacattcctttctaagagctggctcaaataccagcgaggaggacaaacaggaaccgtattaacaacatcaataattaaaccacaattcagttactaaatggaaaataacagatttttgttggatagtgattatttagagataatcaccaaggaagccctggaacaaataatccaaccgggaaacgagtataagtttatacaagccgaggaattggcagagatgtcgatattagagaacctggtggagaattatgagattgagaatgagttaatgaaaggtaaggctatcaggatgtatgatagaaggatcaactatcccgtaggggcgtatatccagtacgaggataatatctataaggtgatccgttctatcagtggctataaggttcccaccgacaagatttattgggaagagtcaatcgagatccaagaacttatcaacgccgatccttactcccaactattgacctatcgaccgggggatttggtttgctacaatgggatcgtgtttgagtgcatgattgagaatggttacgagttcaatgacatacgagttccattatcaaactgctgggagaaagcggaaccgttaaaatggactcctaccccattccagctatacgatccggtaagttatggtgacaacttttatcaactgtatgaattaaccgattatgatgagacaatatcaccagacttacgacctcaatgttggggtgagatattaccatatgatccgaactataatgaatatgagttatcgccacatgaatttgtggtctacgatggaaaggtattctatcctacgttgaacgtgaatagtgacatcccagagatcgggaagaacttagcgttggaggaccccaggcataagaacatcaagaagcacatggtcagattagccctttacgagcttaccaagaacatttctcccaataatgtatccattactaggtcaaacgattatgagacatctatggcctggttaaaggacgcaaacagactgaagatcaaccccatgattccaagaaaagtggacaataccggcaagccaactacggactgggggatagctacttttcagaagtcatacgatccttgcttgaatccttggcaggtgtgacataggaaaaatgatgaacgtaacaggaaggagatagagggtgtgtcaaaactcaaattttgaaatatgaacttataatttgaaatttgatcatattaaaagaccaaagaaagggtcgtatcattactcaatacagagcttgatacggcccttttaagtgttattgttacaatttgtcaatatcgcttatttattaagcctttcataaagaacaaaatctattaccctcctattaagctcgtctatcctaccccaatcaggcttaatatagatatccgttataggcaaggcagaagcatgatttaaacctttagctacattatcaatatctgcgccgatatcattcctcgctatagtggcccacgaatggcgagccgaatagaaagacatctcttgataatcgatgtaatcacgaagagcgatcattccctgtcgtatggcggttctaaaagatctttctgagctaaaacgatctcctatacataagagccgatctccatctccgggatatttgtagataatttcaagcgcttctggttctaactttatcgaggtaaaagccctatccatccttcggttcatggttttggtccgttcaaattccaaccggccttttttcatgttggattttttcatcatcatgaaatcaatagtatttgtccctcttgtataaaacgacaacataaacatatcccttataaaattcaaaagacttctggatggattattgtaataagtatcatccggaatatttgcgatcatccttataatctccggaggtaatgcttttttgtttgagattggcatgggaggcatcttatatctctcgaaaggattgtaaggaatcactatctctcctatctctggattattgtactttgcccttatccggttaatggatgccttaaggttggatatataattacggatcgaggctggggacattcttttatgttgcagaaggtataatcattgaggaacttcaacgtcacttcattaatatttaaagaatctgcccccataaatttcatcaacgaggatctggtggtcaaataattgaactttgtattctcattacttatctcattggctatatccagtatctcggctatcacatcaatgacatgcttcttttccgcattgcataagtccacgatttgtctcaaacttttgcaaccaatcaagttcctagcctcaagatcattgattcttgcttggaacttaaccatgatctcattaataagattaagagatcgacaactcctaatagacaaattcttagttacctcgttggatttcagtataataccagtattatacatatacatctgccgctctctagttaagcagatataacccacgtaagatccatctgatctttttttactcttctgaacacaaggattcaaataaatcatattataaactattaattatcatctgtttgccgaaagccctttttgaagccttttcggttatttttcggcaaacaaccatcaataaatggggaaaaatcagaaacataaaaaactgattttaagcatgatagatatcattttcctgaaagttctcgatgcacttatagtcatgtaatatgacattcgtgtccaacacaaaattcttctttgctcccatggcctttcgatttaatgattattgcttctaatataagaacaattctgacacgttgatagttcaggcctgctaaaattagttacacacaccaataatttcgtcatattgaccaattcaaagaaaatatgtatctttacgaggattaaaaaacacaggaggataacatcatgttcacaaatttcaatttccagcaaatacttagcgcctttatcgtattattcgctgttatcgatataatcggagctattcccatcatcatagacctaaaggataaaggcaaggatgtcaatgcgttgaaggcaaccctaatctcttttctattgttattagggttcttctacgccggggatatattgctcaggcttttccatgtggacatcgagtcgtttgccgtggccggcgcttttgtgatcttcctcctatctttagagatgattctcgacatagagattttcaagaatcaagggccaatcaaggaggctacgttggtgccgctggtattcccgttgctagccggagcgggatcgttcaccactttattatcgctccgtgcggaatatgccagcgtgaatattatcgtggcgttaatattgaatatgctatgggtatatttcgtggttcgtatgacacggaaggtggaaagggttttaggaaaaggcggtatttacttgatccgtaaattcttcggtatcattttattggcgatatccgtaaaattattcatgagcaatatcaccctgctaatggaacagatagaagcgagtacgaaagcaatataggatttcctttaaaagagcatccagtttcatcctattgaaacaaagagttcattaggatgaaactacaaggcatctattattttccgaaacgagatgtgtctatcgaatcatgttccttctccttgtaaccaccaaacttccagacaaaagataatttcagacatctctcatcattcaatttcctcatccggctccattgattgccttggtttatcttgatggtacgtggaatgctgctggcgaaaatatcgtctcctttaagtgtcaagctggcacggtcattcaagaaagtccattttaatccagcggatatctcatacatggaacccaagtcgtatataccttggatagcaccgggagtcacgtattggccgtctatcgtcatttttaaattcggtttatcacataggttaaatgtgttactcatatgcgctaatcctagataagcctcacggttatatgagatgccgtggaagttatcattcttttcttgcatcctccaacctcgcagtgtgatgcggctattccaaaaacgacccacattaaaaggaatgatcaccgccaatcccgtttccagactataatccatattctcgaaacgaaaaacggtcttcagttccgtatcgctttgataaggaagttgggcgaaataatccggcgtgtattcacagaacgctaccagcatatacttttggcggaagatatagaccatctgcccctcatacgtgcgataaggtttcaacaagggatttcccgccacctccgagtaagagtttagaggcgttacttgcggggagacttgccaataaccggggtaggtcttatcgctacttatatcgaactgtaaaatatggcggggagaaaacgtatagctcagggatacggtaggaaacaacgccccctcattccataggttcatattttcccggctagaggtgtagtcagacttaaaatactcccctttcagcccaaccgtagcagagaaacgctctccgaagcttttcgatacctctgcgaaaatatcagcgatgtattccttttgtgtattatcctccaacgcttcctcgtccatctcatagccagcaccttgctcatataaatactccgaatagtttttcgacgaggcgtaacctccatgcacgccgtaattcaatccccacccggaagcgaaactatgtgtcttatttaggaatacggaccagcgggatacatcctgtctcgtattatttatcatatcagtccgggaaccattcgtattcgtatcatggtaatcaagtaccgagggcgaatgataacgagtaaaatccgctcctgccgatatcccggcatgtccgtcatactgtaaacgtatattatggatagcggagtgcccgtcgtcacggaccaagctcgtactctcacttttattttccggcttcgacagatccagatatgaggtaaaggcatcacggtccgataagactttatctcccttcagataatatgccaaagagagtttatcctcattcgcgaacgtataatccattcccagacgaaccgttcctctatttacatggacaagggcccgattatgttggcttatttccgtcataccactatttaatgtatggcgggccaacatatcctcccccatcacatcccgtctcttattaccattcaacaggaaatctaagctaaagcccttattcgtataaagtaaattcacatgcgcatctccccccgcatggcgatattgggtgtaatccacacccgtttcaccttgccaagaaggagtctcggactcattcttacttaatacgacattgagtaacgcccccttgacattatatttagctggagcgttatacatcacctcagccttttcgacccttgaggctggcatagttttcagtaactggattaattgatctgccgacattgtcgtcaactgcccattcaagattatattcaaacgactggcccctaccagttccagattatcattccgctcgataagccccggtaagtccttgatgatctcaaaagcgttcgtggcagtcttatccttcatcagttgagggatatcataggtcagcttgcctccctccagtttcacttgcgggcgttctccctttacggtaatctcggctaactgataatctttctcctccagcaccaccgtacctacgttggcggtagttatctttttccctatcgtattatataagatgtgctggaaaataagtcgatacgactggtctagcggatgattcaatcgaaaatccccaagcgtatcggtaaccacggcatccacatatacagagtcaagggtctgtaaaatcaccgccactccatctatcggttgttccttgccatccatcacttttccggaaataccttgtgccataatctcaccgagactcatcagcaagcataaaatcatgtagtaaatagtacgtttcatatcggtttgtttttatcatttttcgttcatacaaaagaaacgtattcttaaaagaaactatgttaccactcacttacgaagtcttaccttgtcttatcaggaatgttatttagtcttatcgccaattatcaaacccaacaaagaggaacaagataatctggaaaacaccttcagaaaagtagtatgaatggtatcctttgtgctaaatctcacctaagggaattgcaggaaaaaggtttcgaggccgccgtactctttgatgcgaaaacgtaaactgaacattaagaggttctaactgttgatatatcaatcaaatatttgaagataacctattaaaagttgaaaatcatgtgtacaagagtagtttattcgggaacaaacgggatggtagcgactggtcgcacgatggactggaagaccgatatgcatagtaacctatgggtgtttcctaggggaatggagagaaacggggagacaggaaaggattctttaaagtggaaatccaaatacggcagcatcatcacctccgctttcgagatagccagtacggacggaatgaacgagaaaggtttggtagctaatttgctctggttacccgaagcccaatatccggccagagataagaataagccgggccttgccataacgatatgggtacaatatatgttggataatttcgctacggtggaagaagcggtctcttttatcaacgaagatacgtttcaagtagtatcggataagatgccggacggttcccgcttggcgaccttacatttatcgatttccgacgcaaccggtgattgcgctatcttcgaatacataggaggtaaactgaccgtttatcacagtaaggaatacaaggtgatgactaactcccctacttataataaacagttggctctttgtgaatattggaaatcgatcggagggctgagtttccttccgggtaccaaccgtgcatccgaccgttttgccagagctagtttttatatagatgccgtacctaagacggacgatgagaagatagctatcgcctgtgtattcagcgtgatccgtaacgcctctgtcccttatggcatatcgactcccgagagtccggagatatccaccacgcaatggagaacggtatccgaaagcaagaacctgatttatttctttgagtcgagcctgaccccgaacactttctgggtacgactgagagacatggacttatcggagggtgcgccggtacttaaactatccatcgccaacggtgagacctatcatggcaacacttcaaaagactttaagccggcgcaaccattcaagtttatgggtgtaaaggatcttatttagtcttggctaactattttttgggataatatgttccatatttccttttacaacatttgagtttcaattaatatttatatttgacgtcaaaaatcttacaatatggataaacagttcctctgccttgattcacctacagactttatggttggtaaatacatatccgccgatgaactcaaggagtttataaatattccttgtaagataaaagccggggtctttatcctttgcatggaagggcaaatacgctcaactatcaatatgtcagaattgaccacctcgaaactcaatgttgtaacgctattgcccaatagtcgcatacaaatacatgagatatcccccgacatcttgatctatttcatagcgttctctttcgattttatgtgttacgcaaattttatcaagagcacgatgggttatctacttatgatttacaggtatccgattataaaaatatcccaaaacagggccaacctgatcacgaacttctacgagcttctctatcaatatgccgtatatcccgatatcttgaacaataaagagatgataaaggccattttcatgatgtgtagtcaaggtatcgcagaaatatacagtaaaaattacccattagagaaacaggaacttacacgtccgttacaaatctatcaagagttcctaaatatggtattaagatactatacaaaagagcataacgtatcgttttatgccgagaagttgggcctcacgttctcctatttctcgacatccatcaaaaaagcgatcggcgagactccccaagagatcctcacgcaaacaataatcatagacgctaagacacagttaaaagggactaaccaagaaatcaaaaacatagcgatggacctcggctttaataatctatcgttctttaataagttcttccgtcgaaatgtaggcatgactccacaagaatacaggggtaaatcgtatacctattcttgttaccagaaaacatccgactagccgaaagcaaaaacggaacatattatcaaaaagaagaatttcaagggtaccttttataatttttacttttgtagaataatataaaaagacatacgatggaagggcgagagacggatctagaatacaacttattgatggggcttacgggagctagcgtcagcaaacatttattggatgagcatttcacacttttatgggcaaatgacttctattacgatatgataggttaccccaaagaagaatatgaagctcttttccacaataaacccgatttgtattttaaaggttatgatgaagcttggaatatattatccaagaatgtttacgagacgatagctaataaagccagcggttacgaaaccgttatccagatgccaacgagaaaagggaaaagatggactaaaatcacctcaacgtttaccgaccaactacaagacggcatccctatctcctatacggtaatgaccgatgtagaggacgtaatgcgaaggcggatcgagcaaacgatcacttatgataatatccccggcttcatatccaagcataaggtacataaagacggcagttttacattgctggaggcaaatgataaatatatggacttctctggtatcgataaaaattcttttttatctttcagtcctttctcccgtttagatgaaacaagccgtaatacgatgaacgcacatatcccctgtatgctaaaaggggaacctgtacatttcgttatccagtcgaaagacaaaaacggcaacggcgcttggctacagttgaacggggaatgtatcggctgggaaggtgacgagcctatctatcttatcgtttacatcaatatcaccgacattaccgaacagagggagttgcaaaagaaactggagaaacagtcaaagcaacttaaagaagcactaaagtcggcggaacaagccaaccaagccaaatctgattttctcgcccgcatgagccacgatatccgtacacccatgaacgccatcatgggaatggcgactatagccaaagcccatgtagatgaacgtgaaagaatattagattgtatggaaaaaatcaatggagcctctaaattattattgagtctgattaatgaggttctcgatatgtccaagatcgaaagtggcaggttaattctttcggaggatgagttcaatgtgggtgagctcttgcaagacttggtcgttatgatgcaaccggagatcaaaaacaaacaacaaactttaaatatacacgtcaagaaccttaggcatgagaatgtaaaaggcgatacgcagcgtatcaaacaggtattgatgaatatcctctcgaacgcaattaagtatacgccggagaatgggcgaatcacgatagaaatctacgagaaggaccctcataacggcatcggaaattatcaattcgtgtttgaggataacggaagaggtatgaaaccggagtttctggataagattttcgagcctttcgagcgtgcgagcgatgatgagatcaagaggatacaaggcactggcctcgggatgtcgatcagccataagatcattcagatgatgggaggagatatcaaggtggagagtgaatatggcaaaggttcccgcttcaccatcgacatgccattggtttgtcgggatcagaagcccgatgataagatagaggtagaaggtttagaggttcttgtggtagatgatgataagatcgcttgtctaaacacgtctagctgtttgcgagagatcgggataaacagtgaatgcgtatattcaggtagcgaagctatagaaaaagtacgacagcatcatttagcggagaaagagtatttcgccgtgatcattgacttgaagatgcctcaaatgaacggcattgaaacaacccggcaaatcagacgtttcgtgggagcggacgtaccgatcatcattctctccgcatacgatcttgaggaatatgaggcagaggctaaggaggttaaggccaatggattcatcaccaagcctctctataagtccaagctactccaagtattgagatctttccttgacgaaggagaccagccggaaccgatccgcccattcaagttatcaaacgtcgattattccggcaagcgcatcttgctggtggaggataacgagttaaatcgtgagatcgccgtagagatcatcggcagcaccggtatcactatcgatacggcgataaatgggctcgacgccgtacataaagtcgcccaatcggaagaaggattttaccagataatactgatggatatccagatgcctatcatggacggttatgaggcgacccggcagattcgttccctccaacgaagggatatcgcacatatgccaattatagccatgaccgccaacgctttttccgaagacgtgacaaacgctatcaaagcgggcatgaattatcatttggctaaaccgattgatattggggcgttgatgggcatccttagtaaatatttacaagcgcccgcataaagtttatcttgcgtattaaaagttcatgtaataaaattgtctatttttagcgatcaattcgattataagcataaagagacttcatgaacatcagacttcgttttaagttaatcgctttgttgatcgtcctatcgctggccgggcttttggttttccaaggatactggctgaaaggtttatatgatacattatataaacagatggagatcaatatagaggaagcgatgaagatcgccgactataaggagttgttcctgcgcatccgatctatcaaaaaagaacagggagcgctgggacctcaaacccaagatgtgtacttcagctcagagctagatccgtctaataagcagaagatggacgcaaaagcttcgatccatccgcagaaagaagatcctgaccttaaccgggaagatatcttcaagacggcaaatcccgactcacacatgaaactacatatcgattacggggatgaggaggactttagctcgatagactctaccctaacggattacctatatgtaatcggcgaggtggaggacatggtgcagcaagcgatgcacgcgaatatagattctataaaaccaattgatttcaagacctacaacaaattattaacctcggagctggaggcaagaaacatcgtaacggaacatgagctggtaacgatttataaaccaaacaacggggacgagaagggttggatgcatctggacaagccggaacgattcactacgtggaaaaaccccgtgcatttcgattacccgctccataacgagagcacgttacaatatcgcctgttcctcaaatcgccggccagcgtgatactcacccagatgaaaggcatcctgatctcctccttcctattacttttgctgatcatttgcgctttcatatacttactccgcaccatcttaaagcaaaagaccgtggaagaattgaagaccgatttcaccaacaatatgacgcatgagctgaaaaccccgatcagcgtcagctatgccgccgtagacgcattattgaactttagcgatcccgtcaacgagaaacagaagaaatacctgacgatcgttaaagaccaacttatccatcttaccggattggtggaacaaatcttgacactcgccgtagagaaccgcagtaccttccgcctgcgccccgaaaccatctcattaaacgagttggtgaactccctcatcgagcaatacaaactgaaagcgagcaaacccgtggagtttacttgctccatccccgaggatatagaattggtggccgatcgtacccacctatataatatgttgagcaaccttatcgataacgcgatcaaatacgccgacaaggaaccttgccgcatcgaagcgacagcccggcaagacaatcacgaaacgacaatctccataaccgataacggcccgggtatcagcgaagccaaccagcggcagatattcgacaagttcttccgggttcccagcgggaatatccacaacgtgaaaggttatggcctaggattatattacgtaaaagacatgatgggtaaacatggaggaacagcccgtgtggaaagcgtccccggcaaaggctccacctttaccctgcattttaaataataatccgaaaataaagtatcaaatatggaaaagataaaagtactactagtagaagacgagcctacattggccatgatcatcaaggatacgctggatgggaacgagttcgatatcaccctagctgcgaatggcgaggagggcctctcccgttacgcagagatcaagccggatattatcgtagcggatatcatgatgcctaagatggatggtttcacgatggtcaaattgatccgtaagacggatacgcacacccctgtcctattcctatcggcccgttccgcggccaacgacgtggtagagggcttcgagctgggcggcaacgattacttgaaaaagcctttcggcatggcggaattgatcgtgcgcatcaaggcgttactgcataaggtgtccgtccaaagaccggaagccacctctttccgtatcgggctttatacgttcgattccatcacgcagacattggtctaccggggagagaaacaactcctcagtaaccgggaatccgagatattgaagcgcctttgcgacaataaggaccaagtattaccgatgaaagagatcttgatagacctttggggggatgattctttcttcaacgcacgcagcctgcatgtctttatcaccaagctacgtcataagttatcgaaagacgagtctatcaagattttgaatatccggggaatcggatataaactgatcattgattgaattgcttcaatgcctgtgccatctggtccgggcatgaagttccccttccatgacaatcgatgccagacaaacgaccgatagcgtcttcgatgcgcatacctttcaataaggcgcacatgccttgcccgttaccgtggcaacctcctacaatctgcacattctcgatcacgccatccttcgcgtcgatcaccatcaacttagaacaaacacctccttgaggcgtataggttatacgtcgtgtttccattttctttttctctcctttttataaacgagtcgcaaaggtataaataaaattaactacatttgtagcatctaatttacaaaaacatgacatacgaggaaacgctacactatctatataccagcatcccggtcttccaacatagcggagcttccgcttacaaacccggtcttggtacaagtatcgccctagatgattatctgggaaatccccataaagcctataagaccatccatgtagccgggacaaacggcaaaggctcggtcagtcatctattggcggccattctccggcaatccggtttcaaggtcgggctttatacctctccccacttagtggacttccgggagcgcatccgggtgaacgggaaaaagatctcccaagattacgtggttgatttcgtcgagcgtcatcgttctttcttcgagcctctccatccttctttcttcgagttaacgtccagcatggcttttgagtatttccgcgaccagcaggtagattacgcggttatcgaggtcgggcttggcggtcgtttggacagtacgaacattatcactccgatcttgagtattatcacgaatatcagtctggatcatacgcaattcttgggagatacggaggagaagatagcggcggagaaagccggcattatcaagaaaggcgtaccggcacttcttggggaagccgagaaacaatcggtttacgacgttttcaaaaacaaggcggaagaagttggcgcacctttctactacgcccaacgaatggacatggtaaaagacgagtgcaggctgacggtcggtggcaaatggttcttcccttccgttgaatatggagaaatccaaggagaacttggcggtgaggtgcaggtaagaaatgctgtcaccgtattatccgccatccatatattacgaacggaattgggtgtagatatcatcccggaagcggtacacgagggtttcgcccacgtaacgaaactgacgggattgatgggacgttggcaaaccttgcgatccaaaccgaccgtcatttgcgacacggggcataatgtaggaggctgggagcacctagcggagcatctgaaagtcttgcgtcaatattgcgggcaaatctatatgatcgtcggcatggtaaacgacaaggatatcgatggcgtattatccttgatgccgcaagacgctttttatttcttcacgcaagcctccgtggagagagcgatgcccgtagaggatttcgccgtgaaagccatgcgtcacggactgtccggtaccctttgcgatacggtgcaagacgctgtcgagaaagcgttaagaagggctcgtgagaacgacctgatctttatcggaggcagtacgtttatcgtagcggacgctctccccttgttcatgaaagaagacgaatacaaataatataactctataaaacaaatatcatgatagaaaaaattcatcagaaactaagcgactcgaaagtcgcacgctggagtgtactcgctttggcggcattcacgatgctttgcggatacttccttacggatgtaatggctccgcttaaaccgatgttggaagaacagctaagctggacgagtacggaatatggttggttcaccagcgcttacggctggttcaacgtatttctcttcatgttgatcattggtggtatcgttctggataagatgggtgtccgtttcacgggtgtcgcttcctgtatcttgatgattatcggttgttccattaaatattacgccatctcggacgcatttacgatggaaggagagcttttcggatggaaagcgcaagtgatggtggccgccttcggatacgcgattttcggtgtcggcgtggaaaccgccggtatcacggtatctaagattatcgtacggtggttcaagggaaaagaaatggcgttggctatgggcttggagatggctacggctcgtttgggtacggccttggctttatctatcacggttcccgccgccaagtacttcggtagtatctccgctcctatcttgctttgtctttgtatgttgtgtatcggtttgatcgccttcctcgtattttgcgtgatggatcgcaagctggacgcttcgatggacgctatcgagcaagccgaggaggaagagcctttccgtttgaaagatatcttattgatcgttaccaataagggtttctggttgatcgctctgctttgcgtattattctattcggccgtattccccttcttgaaatacgctacggacttgatggtcaataaatataacgtagatccggagttggcgggaaatatcccggctatcttacctttcggcacgattcttctgactccgttcttcggtaatttatacgaccgcaagggtaaaggggcgacgatcatgatctttggcgccttgatgttgatcggcgtgcatttattattcacgcttccgatcttgaatcagtggtggttcgccacgatcgtgatgatcgtattgggtatcgctttctccttggtcccatcggcgatgtggccatctgttccgaagattatcccggagaagcaattaggcacggcttatgccttgattttctgggtacagaatatcggtctgagtatggttcccttattaatcggctggatattggatacgtattgcaagatcgacaatggtacgggcaaaccggcttacgactatacgataccgatggcagtcttcacctgcttcggtgtactcgccctcttcatcgccttgatgttgaaacgtgaggaccggatcaaaggctacggccttgaattgccgaacatccaaaaggacgccgataaagccgaggccgagataatcgctaaagagatgatcgcggagccttaataaagctcataaccctaaataaatggaaggcgctgtaaacttgatttaccgcgcctttctttttgatgactgaaaaccatcgtcattggaacacacaaaaagttcgtttgaaaaagaggagtagcgaaacaactacaatatgccttattcataaaatcttttttagcggtaatattaataaaaaacacccttgattttcggaacggcatattgaaatgtggcatttatccgtggtccagccatccaaaaggaaatcatatgtataggtcttaacgcagtggctcatatatttcattagatccttattatcagttaagaatagatatacagcttcacaaatatcgttttgattaaaaaagcaagtgagcgtggaggttttgaacacgacttccaatgtaatctggcttacgtcattccacgtataagtgatcatacataaatccagatccttcaataacatctgcgctttccttaccggcaaaccaattacttgatgggataagcttattatctcggaataatccttttgaggatattgattttgagtttccattgatttctgtgtttatcattcgcagacaaaataagcttaccgcctgctgatataccatcaatccccctgataaaatatcaatgtcacgactaatattatcagatgacagggataaatgatatatctgactacgtattgtcggtaatgcaggatcatcatgatagacacctaacaaattacgatgaatttatgtttctctggctatgaataaaattgggtgcggttaccccggatatctgacatgatagtaagataactcagatttaatacttatttttgtgacaggatcaataaaaactgacatggaaacaacatttaccaaaagaaatagtcatggagccaacttaaaacgttggagagaatggagaggcatcaaacaagaagtgctcgccgacaaaattggggtatcacaagccaccttatccggctacgagaaaaaagacgaattggaacctgaggtattggaaaaggtcacgaaagctttggatattccgatagaggcgatcacggaattgaatgaagggacatctatcaatattttttccggcacgtggcaagataacgcaagcggaaatgttcaaaatcaaacattcaatcccatcgataaaatagtcgagctttacgaacgattactaaaggccgagcaagaaaaggttgccatgctccatgaaatcataaaggataaataagtatcgattatagagaccgtaagcgaaaatgagataatcttgacattatgatcgaaataacagaataacgatgtcaagacctttttacaaatagagaaaaagagggagagacctatgatgaaatcatacgttttccctcattttcttgcctaaacacccctgtttggactcaaaagtaatagagttaggtaacacaaaaggctgtattaggcaacacgaccgtatgtattaggtaacgcaaccgtatgtattaggcgatacatacggaagaaacagccctcgcatcctatagaattgatcgatacacccgtataaaatggctattttcacctaaaaatatgagatacgatgaattaatctcgctagaataaaaaggcctatttccataaaacactacaagacaaccagatgctattattctatgccattttcggaagcaaggcgtaccttggcccggaaaaaacgcttctccgggagtttagattacagaatgtcaaaacgtcaaacctactcttttatgcgtgatgcctacagctatgcccgcaagaagaaaactaaaattaaactcaaaaaatatacttacaacattattatgtacaataaaatatttatttttacacaaaatctgttgttatgacaaaagaacaattcctaaacgatcagtatgtatctggatttatccagtggcttcgtgataaactatctaatttcacccattcatattacaatcagaaagagaaggaggaatggcaatgtacctctttttatgatgcttgccacaaatataaatggggaggtctaaattgggaggaaaacaatgccttattggaaagttatgccaaacgacttaaagcgagtatccgaaataatgacaacgaagcttgccaagatgcttgcctcgatatattaaaatggggaggcgttatacgggaaaatcaagaaaggatcaaggcacaaaccaaccttgtgaattatctaatgaaggcagaagaggtcttaacccgtgactctttagatataaaggatgagataattattatgaactcaggattcaccaagatttattctttatatataaatgattttatcatctacgatagtcgtgtaggagccgctttatgctatttggtgaaactatattgtatagagcagaaacaaggcggtgtcccttcttcattaaaattcgcctatggtgatgcccgaaatccggaggttaatcggaatcctaacagcgacatttacaaattttctaaacttgatcgaggaaaaatccatattgaatgcaaccttaaagccaattggctattaaaagaagtattaaacttcccagaatgccaatttaaagacatgcgttctctggaagcagccctcttcatgatcgggtatgcaattccaaaagagcaagaacagcaaacattaaaaacataccgaattatgaaattagcagaagctctcagcttacgagctgatttacaaaaaagaatatcacaactggaagtccggctaaaaaacaatgcccggattcaagaaggtgaagagcccgcagaagatccacgggggcttatggatgagttgaataataatctgaatgatttggaaacactgattttcagaatcaaccgaaccaacatggctacccttgcagaaggtacaagccttacggaaatgatcgcaaagaaagatatcttagcattgcgcatctccgtccttcgttccgtcacgcaatcggcaacgggcagtttagaacgttattcggcaaatgaaatccgttatgtccgcacaataaatgtggcagatttacaaaaagaaatagattcatattccaagcaattacgtgaattggacgtgaagatccaacagctaaattggttgacggaactgatataaagcataattcaggtagttctttttaaatagggcgagtatatctctggcaattgagaatgaattgtcgaacctactgcgaatggaagcgagagcggagcatagcgcaaaaagaatcgtaatgctcagtattgttacaagctcaagccacaggttgcattgttactaccgcatactgactataaagagaatgagggcgggtcggagggattttcttttaagcaggcatttaattatgggcatcctaatggatatggagaaacaggtcgctggcggtatgacacttatagggaaattttggtgtgattatcctatttgcccatcaaatctaaggtaattctaatcggtaaacattatctttgcgtatcacataaaacaaacattaaatactatgatctgtttcccgaacgcaaagataaacctaggtctgaacgtggtaagcaaacgtccggacggttatcataatatagagaccatcttctatccgatccccgtgaaggatgccctcgagatcgtcgcctcggatcggacctgtttcacgcaaaccggaattccggtagacgctccccaagagaagaacctcgtcataaaagcactgaacgccctaaagacgagatacgagattcccccgctagagatccatttgttgaaagcgataccttttggcgccgggcttggaggaggttccgccgatgccgcttttatgttgaagctggtcaatgatttctgcggtttggatattcacccggatgagttggaggcgatagcgtccaccatcggagccgattgcccgttctttatccgtaacacgccggtattcgcgaccggcacgggaaaccaattcgagcccgtggacttgtccttgaaggattattatctatgcttggtaaaaccggatgtagccgtctccacccccgaagcctattcgatggtaacacccgccgcgcccgagacctccttgaaagagatcatccggctaccggtatccgaatggaaagagcggatggtgaacgatttcgagcgaagcgtattcccgagacatcccgtgatcgagcggatcaaggataccttatacgagggaggcgccttatatgccgccatgtccggctccggatcgtccgtgttcggtttgttcgaaaaaccaacccatttcaaggaacaatccctgttcagcgattgttttctatgggaaggacaattatcatgaatcaaatagagactttttttgatacgatggcggaacgctgggacgctgtctgcgtacatgatccgggaaagatccggacgatattggatcgtaccaacctgcggcagaacgcccgcatcctcgatgtcggttgcggcacggggatattggaaagttacctgctgccgtacgaaccccgccaaatcgtagctatcgatatagcgggccaaatgatcgagaaagcacgcatgaaatatccggatcatccgctcatcgagttcctccaagaggacgctatgagctacgaggggaaaggattcgactatattatcctatatagcgcttacccgcatttcatgcggccggaacggttgatcgagcatatgagcggcttgctcgcgcccggcggtaaattggttatctgccacagcgagagcaaggaaaagatcaatacgcaccaccatcggcacgccgatcgattatcgctgcccttgcccccggcccgagaggtggcggcattgatggagccttatcttcttccgctcgtcgtagaggataccgaacagctttacatcgtttgcggaaaacgtttatcctaaactaattatatatggacagaaaaactaacttaattccggcattgcttctttccgccctttcgctttacgccatggaagacgtgaaagtaacgcaattccagcacgcaggcccgttcacggtcaacaagccgatcctagcggacagcctcaacgtaaatggcaagcctttcgaggcgaagaatctattaaaagcgaccttaccgttcgagcaaacgcttgcgaacgccacggtactcgacgctgacacggcaggcgcaatcaccttcgctgccccgcgaaaaggatatgccctgcatctattctctttcttcttgaacagcgaccggtacgtaaaaggcacgctcgatatatcgggtcccggggcgttcgaagtattcgtcaatgataaaccggtcggagcctcctccgagttggtgatggaaccccgccgctatcaagtagtcgttaaatacctgacagcggaaacagacacttgtcctcccagcctaaaggctaccttcaagagcgaggcggaagcgaaagtcgtagcttccttgaacccggagaaacgctacacccttctgaatatcctagaaggaaaggatttccaaggcgtaagtgtctccccgaacggaaagtatgccttggtaaaatacgtcaaccggttcccggagagcaagagcgaatcgtacgggcaattgatggatgccgctacgggacgggtcttattgcaagacggaggtttcttgacaaccgccaaatggatgcctaaaagcaatcgattgtattacacccgcaccggtctggacggtacggagttggtaaccgtagatccgtctacctaccaacaaacggtattagtcccgaaccttccgaaagggcggttcgtattcacccccgatgagtccacgcttctctataccgtagaagaggaaggtcccaaggaagggacggacttgatccgtgtattagagccggcagaccgtatcccgggtttccgtgaccgctcctttatctggcggtatgacttaaaaacaggtttgtacgagcaacttactttcgggcatacggacacttatatcaatgatatcagcgctgatagccgctatctattgttcagcaccagcgaccgggtgtacacctccttgccgcactcccgcaactccctttataaattggatttgcagaccatggcgatcgatacgatctgggagaaagccccgtacgtaaaccaagccgccttctcgcccgacggtaaacagttattggtagctggggcaggcgacgctttcgacgggatcggacgaaatatcaagcaaggacagatctccaactcgtacgacgggcagttattcctatacgatctggcaagccgtaaagcctcccctctcaccaaggatttcaatccgaacgtgatcgatgccgtatggaaccgcttcaacgggcaaatctatatcctctgtgaggatgaggattaccaacggatctatacgtgcgatccggcaaacgggaagatcaagcaagtagccgcctccgaggatattatcatgtcgtatgcgttggccgacaacgctccggttctcttctattacggacagagcgcgtccaacgccaaccgcctttacgcttacgacctgaaaggtggaaagaaccgcttggtgtatgatctctcgcaagataaattaaaagatatcgccttgggcgaggtacacgactggaacttcaagtcggatgagggtacgactatccaaggccgttattacctgccgcctcatttcgatccgaataagaaatatccgatgatcgtttattactatggcggtacttccccgacgaaccgtgcgctggagatgcgttattccatgcatatgtacgccgctctcggatacgtggtctacaccttgaaccctagcggaacgacgggcttcggacaggaattcgccgcccgccatgtgaacgcatggggcctgaagaccgccgatgagatcatccaaggtaccaagctgttctgcaaggagcattctttcgtgaacgagaagaagatcggttgcatcggtgccagctacggcggattcatgacacaatacctacaaacccgtacggacattttcgccgccgctatcagccatgccggtattagcgcgttgagtagctattggggagaaggttattggggatatggctattgctccgtagcgaatgccggcacttatccttggaacgccccggagttctttaccaagcaaagcccgttgttcaacgccgataagatcaagaccccgctcctgttgcttcacggcaacgccgatacgaacgtacccatcggggaaagtatccagatgttcgccgccttgaagatcctagggaaaaccgtggagttcgtgcaggtggatggcgagaatcatggtatcgtaggctatcagaaacgtataggctggcaaaataccatctacgcatggttcgccaaatggctgaaagacgagccggaatggtggaaagccttatatccggatcgtactttataagaatatttatttgaacgaaagcgtctgtgtctcccgcaagggaatcgcaggcgctttattcgtttgctcaaccccggctgtcatccggatcagctccgtttacgaacggtaattttgatacaaagatccgtaatatatatacatatacttgagataaatccgaatatctttgtgatgtcaaacaataacgatatcctcatgaaaacaaaagcaatcgcactcttcctgctaggcttcataccagccttcgcacaagatatcccaacttctaaaacagaacaaaatatggacagaatcgaacgctgtaaaaagaattacaccgagctattcggaggcgaggcattgaccggacaaggaacagatccggaaatgatggacattctccagaaattcatcttcggggaggtattccgcacaggagatcttgataaaaagacccgggagcttatcacttgcaccatattagccacgatgcaaaccttgccccaactgaacgcccacgccaaagcggcgctaaacgtaggcgtcactcccatcgagctacgggaggcaatatatctatgtgccccgttcatcggtttcccgaagacattgaatgccttaaataccatcaacgaagtctttaagcaacaaggcatcgctttgcctctggagagacaagctaccgttacggaagaagatcgccacgagaaaggacaagccatacaaagccggctttacggcgagggaatcaaagaggccatgaggaacgtcccgggaaatatgggtccggaagtagagcgattcctcaccgaattctgcttcggagatatctatactcgcaacgggctagacctgaaaacccgggagttactggcttattgcatactaacgacccttgaagccgaaagccaactacactcgcatctcgaagggaacttactggccggcaatagcaaggagaccttaacggcggcggttatacaatgtcttccttatatcggcttcccttccgctatcaaagcgttgaaaatcattaaggaatcctctcagcccgccccaaagaagaacttagtccgcctatccaagatcacggtcgatcccgcccagttggagcgttataacgcctttctggaagaagagatcgaggcttccatgcgtctagagccgggtgttcttacactgtatgccgtatcggagaaagaacatccaaataaagtaaccatcctagagatttacgcagatcaagacgcttataaaagccatatccaaacgccccatttccagaaatacaaacaaggaacattacagatggtgcaagagttggagctggtagatagcacgcccctgatccccggactaaagataaaataaaacaagaatccccgctttccggcacgaagccatctaagcggggatttcatatatccgtgaaaatctaaatgacttgttattcgatcatttgatattcggattcaatttatgccattcggaaatagcgggaagcacgcccatagcgatcacctcgtcacgtaaagcgcaaaggtgcttgtagctcttctccaaggcagcctcttcttccggtgtaccgtgcacctctttcaacgctacgccgtctttcgtaattgaggtctcccaagccatcatgatatgatcgaacttaccgtttgatacataagcgccagccggccaacggaacggtttaccacccatcgcagctgcgatcatctcgatagatacatatgacgggctttggaaggaagaacggccccgcaaagcgataatgttagcgccacccttcgtaaccttggtttgtatctccgcccattgatctttcgtcaaggcatccgtaccgataagttccgtcaaaggcttgccatccaccttagcggtagaggcgaaaacagccatttgctcgccatgaccgccatacgtacgacaattctcaacctgatccatagagataccgaaatgttttgccaactcactgcgtaaacgagttgaatccaatgcggccaacgtcgtaacctgagaaggtttcaagccggaatacaataaggtaatcaaaccggtaatatccgccgggttaaaaataaccacgatatgctttacgtccgggcaataagcctttacgttcttgccgaactcctcggcgatagcggcgtttccttttaggagatcctcacgggtcatacctgcctttcttgcggcaccaccggagttaacgatatatttagcgcccgtcaaagcctccttgatgtctgaggtaaaagtgatgtttacaccctcgaaaccacaatggaataattcctcggcgactccctccaaacccggtgcgtaagggtcgtacaaacaaatgttagaagttagtcccatcataatagcggtctgtgccatattagaaccgatcatacctgctgcgccgacaatcgtcagcttctcgtctgtgagtgttttcataagaaaccttgtttttaaatgtttatttttcttttcgacacaaagatacgagattgagaactcttgtcctaatcataaaaacgaatcccccataaataaaagttatgaatagcgtctctatgattattccaagattatcacgtacctttgtattatgaaaacatttaaactagacaattggttgcccacgacgaagaaagaagtcgaggcacggggatgggattacctcgacgtgatccttttctcgggagacgcctatgtggatcacccctctttcggggcggccgtgatcggtcgtgtattggaagcggaaggattacgggtagcgatcgtaccgcaaccggattggcggggagattaccgggatttcaagaagctcggcgttccccggcttttcttcggtgtatccgccggtgccatggattcaatgatcaaccattatactgccaataagcgattacgcagcgacgacgcctatacgccggaccaacgtccgggaatgcgtccggactatccgagcatcgtctatactaaaatactgaaagaattgtatccggatgtccccgtcgtattgggtagcatcgaggcctcattacgccggcttacgcattacgattattggcaagataagctattaccgggaatccttgccagtagcccggccgatttattgatttacggcatgggcgagaagccgatcaaggaattggtgcgccgcctaaagtccggcattcctttcaacgagatcaagaacatccgccaaacggtttatctggcagacaaagaggatgcgaaagacgacgatatcgtgctcttctcacatgaggaatgcctaaaagataaattgaaacaagcgaagaatttccggtatatagaagaggaatccaacaaatacaatgcctcacgtatcttgcaaaaggtaggaaaacaggtgatcgtagtgaatcctcccttccctccaatgacggaagcggagatagatgcttcctacgaccttccctatacccgcttgccgcatcccaaatacaaagggaaagtgataccggctttcgagatgatcaagttctcggtgaatatccaccggggttgtttcggaggatgcgcgttctgtaccatatcggcgcatcaagggaagttcatcgcctcccgaagcaaggaatcgatcttgaaggaagtgaaagcgattaccgaaatgcccgatttcaaaggatatctaagcgatttgggaggcccttccgccaatatgtaccgtatgaaggggaaagatgagcgaatttgcgccaaatgcaagaaaccgtcttgtatctcccccgtcgtttgcaagaacttgaacgcggaccatacgccgctactggatatctacaaagcggtagatagacttcccgagatcaagaagtcgtttatcggaagcggtgtacgctatgacctgttattgcaccgttatgcggatgagtctttaaacaaggcagctcaaacctataccgaggaattaatcgcccgccacgtatccggccgtttgaaagtggccccggagcatacgcaagacgaggtgttgaaacaaatgcgtaaaccgtctttctcgcaattcggacagttcaagaagatattcgataaggtaaaccggcaatacgggttgaaccagcaactcatcccctatttcatttccagccatccgggatgtaccgaggcggatatggcggagctggcggtgatcaccaagagcttgcatttccagttggagcaagtacaagacttcacgcctacgccgatgacattggctacggagatgtattataccggatatcatccttatacgttggagaaagtatatacggcccgctcaaaagaacaaaagttggcacaacgccagttcttcttctggtataaacccgagtcacgccgtcagatcatgcaagtattgcaaaagatgggacgaaaggatttgattgagaaattattcggacagaggggtgacatgaatcccgctcccagaaaaagaagataataggcttttgagattagctgtatcgatgaattacgagagtagtcgcatcgtatcacgggagtagtcttgatggataacgagagtagtctcgacaagcgatgagactactctcgttattccttatgattattctttcacggcgatcacctcgatctctaccaaaccattcttcggcagtgtcttaacggctaccgccgaacgtgcgggaaacgcaccttcgaactgagaggcgtatacctcgttcataacggcgaagtcgcccatatccgctaaaaatacggttgtttttacgacatcattgatgctataaccagcctctgccaagattgcgtgaacattcttgaacgcttgggcggtttgttcctttacggatccctcaacgaaaagtcccgtagcaggatcgatacccagctgtccggaagcgaacagcatattacctacttgcaccgcttggctatacggaccgatagcggcgggagcgttttttgtagcgataactttcttcattttcttctttagtttatatacatattattattgttgctcgttcatacgttggcgaaccacttcgtacaccaaaatagaagtggctacagatacattcaaggagccgatcgttccgaattgcggaatctttaccatattatcgcagatgcgcaagttctcctgagacacacccgtatcttccgctcccatcacgatcgctaccggtccttcatacttcaccgccgtataattctccgccgctttctcgctggcggcaaataccttcaccccgctttgctgcaagaaacggatcgcttggttgatactcttctccttacaaaccggcaatacatgcaaggcgccggcagaggtcttgatcgcgtcggcgttcaccgaaacgcttccttttgccggaatcacgatcgcatcgactcccgcacactcgcaggtacgggcaatagcgccgaaattacgcacgtccgtaaccccatccagcaatacgatgaaaggatcttttccttgctcatacacaaaaggaatgatatcttccaagctctggtaggtaaccgccgacataaaagcgatcaccccctgatgattctttcgagtcaaacgatccaagcgttcagccggaacacgttgtaccggtatctcacggcctctcagtacctcaaataactctttggatagatccccttgtaaatcccttttcacaaggatcttatctacctccttatcagcctgtatagcctcaatcacggcacgaatgccgaacaccatctcgttttctttcatactttatataacgcaaaactattaatttcacaaatgtagggataaataatcaattcttcaaaccttcagccttcgcataacattcccggcataaaggctcgtattcggattgttcccctaagaagacccgtttatcatttcccacgatacgatgggatacgtaagccaaacgtccgcatttcacgcagatggcatgcactttcgtcacctcatcagcgatagcgcatagctccggcataggaccgaaaggaactcccttatagtccatgtccaacccagccacgatcacccggataccgttagcggccaattgattgcatacgtttaccaatccctcgtcgaaaaactgggcctcgtctatccccaccacatcgatctcggaagtgaacaataggatactggaggaagaatccaccggagtagaaggaatcgaattactatcgtgcgagaccacgttatcctgcgaatagcgggtatcgatcgcaggcttgaaaatctccacccgctgcttggcgaattcagcccgcttcaaacggcggataagctcctccgtcttaccggaaaacatggaaccgcaaatcacctcgatccgcccttgtcccggatactggaatatatgttcttctgaaggcaatgtcattactttctccttttttgccggcaaaagtacataaaaaagcggaactgcggaagcttactcaccgtatcaccggttctaattgtctctgcacaggcgttgcagtgggcattgcctatagtgatacacggtgtaaggcatccatcgtccgcctcgttataaattaaggttgggccggtctattttccagttaagcgacggtatcttccggttcagtaaaaatccgccttattccttcacccattgcctctatttttgcccggtaataaataactaggtatatcttatgagaagaatttcatatatcctgcttctgggcatccttttatcggcatgccaaaagaacacaaagtccaaaggcacgaacttacctgtcgaggtgatctctccaataaaaaagacagagaccggcagaagtcgtgaatacacctttctatcaagaccctataatgagacagtcctctctttccgcatcaatggccccgtcttgaatttcgacttacggcccggacaagcgttctccaaaggcagcacaatcctcttgatcgataaccgtgacttcttgattcgcaagcagcaaacagaggcgctctactcgcaaaccaaccaagagtataaacggatcgaggccctttacaaaaagaataacatctccggaagtaactacgaaagagcgaaagcagatttccttgtcgccaaatccaattacgagaccgccgtcaacgccttaagcgacaccatctgtccgccccttacgacggatatatccaaaatatccatatcgaacctttccaagacgtgaaagcgaccgagccgatccttaccttcatagaactggacaggctcaagatcgagacctatataccagaggaagtcgccttacacttatatgataaagaaaaacagaagctatgtcaaatagaaatccatttcgatacggctcccgaacggacaatcaccccttccgatttatatgtgtctaaaagtacgacaaacaataacctctcttatctgctgaccgccattgtcccaaatccagatatggaatggctgggtggaatgagtggaatcctctcgatcgacctacccaaagaagagcggtctcaaaatctatggcttcccttaacggctatctgtcaccgcccccaaaaaggagattatgtatgggtggttaaaggagacaaggtaaactccgttcccgtcaaactcggtgagcaaagaaataaccagatagagatcgtggaaggaatcacggaaaatgaccttgtcgtattgacaaggcaacgtttcctttccgaaaatagtaccgtaaccatccaaaaataagtaagatgcaaaaattcatcaaatatttcctgaaaaacaaagcggttacatggctcctgctagtcctaatcttggcaggggggctgttctcttacgcaaagatgggaaaactggaagatgccccgtttacgatcaagcaagccttggtacttaccccttatcccggcgcctccccctcggaagttcagttccaagtgacggatgtactggaagaagccattcaatccttaggcgagttatactatctgaagacagagaaccgggctggactttccaagatcacggtctacgtgaaaaaggaaatccgggccgacgagatgcagcagttatgggataaactacgccgaaaggtaaacgacgtacaaggcaaattaccttccggagcgggaacctccatcgtcaatgatgattttggcgatgtattgggtgttttctacggattgaccggagaatcttatacctaccgggaactggaggatcaagccaaactgatcaaagatgatttactgaaagtaaaagacgtggcaaaggtagagatctacggcatacaaactcccgtaatcgatatccggataaaccccacgatcttatccaatcggggtattacgacagctgatatcaaacgggcgttcgacggacagaataaaatggtagacgccgggagtattcgcaacggggagactcgcatacgtatcgaatccaccggtaatttttactcattggatgatatccgtaaccttacgatcgtatctcattccggcgaacatttccggctaggcgatatcgcccgtattgaggagagttaccagactccgccccaaaacttcatgcgcatcaataacaagtaagcggtcggtatcgctatctctaccgtaccgaccgggaacgtggtcgatatggccaaggccgtgaaaaagcgtattcaatcattttcggagaccatgcccaagggttttgagctcacctccatatacgaccaaggatatgagtccgccgtggccaaccaaggatttatcttgaacttgatcatctccgtcgtgaccgtagtagcgatcttattgttctttatcggtttcaaaaacggccttttgatcggtagcggattggttttctctatcttcgccactttaattgtcatgttcgccaacgggatcgctttgcaacgaatgtctcttgccgctatcatcattgcgatgggtatattggtagataacgccatcgtagtatcggactctgccttggtaaatatgcaacgaggcatgcgcaaacgtatcgcaatcatgagggcttgctcatccaccgccttgcctctactggcggctacggctatcgcgatcctcacgttcttgcccatttattattcaccgcatatcacgggcgaattactttcatccttagtgatcgtgatcggagtatccttgatgttcagctgggtgtttgcgcttacgcaaaccccattcttcatccaagagtttgtacggcgccccagaccggacgagttaacaggggaattattctctggaaaatactatgattattttcggtcttccctacgtcttgtcatcaaataccgatacgctacagtaggtatcttatccgttctattggttatctccgcatggagtttccagtttatcccgaaagtgttcgtgccctcgctcgataagcagtatttcactttagatatgtggctaccggaaggtacagccatcgaggaaaccgatcgatacgctaccgatatggtcgaatccatccaagaatattcgcagacggaaatggtttcgacttatatcggacggacaccgccccgttattatctatcgaacgttagcttcggtccccaaccaaactatgctcaattattggtaaaatgcaagacatccggagaggcccgggaattgcatgccttgctacaagactcaattcgcttaaaatatccggaaccgctcatcaatgtgaactagtttgagttaagcccgcttacggaagccttgatagaagcccgtttcctcggaccggacccggcggtattggactctttgaccggagtagctatcgacattatgcgaaggaacccgaaagtaaccgatgcccggaatgaatggggtaatatgacctatatgatacgcccggtatatgatccggtaaaagccggtttcttaggtatcaccaaggctaatttgatggaatccgtcaaatccatcgaggaaggtacggttatcgggatttaccgggatgaggaaaagaaagtcccggtcttattgaaatcggagaagagcggaatcgacgatccccgttcattaggtgatttctcggtgtggaacggagagaaatccgcacccttgtcacaagtaacccgacaggtaacctccgcatgggaatatccgcagatcaagacctacaaccggcaattgtctatggcagcgatgtgtggcgtgaaaaacggttacaccatgtctgaggtacacggtgagattcgggaagagatcgagaaaatgaacctgccccaaggatatagcttcttctgggattcacaatataaagaccagacagagggattgcaagcccttgtcaaattcttcccgctggctttcttgatgttggttgttatattggtcgctttattctccaatttccgtcaaccgataatcatcctttgcgtgctccctctctccttaatcggggtagcgatcggtatgttacttaccgggttcgatttcggctttttcccgatcgccggatggttggggctcttgggtatgattatcaaaaacgtaatcgtattattagacgagattaacacgcaacgtcgtaacggtatctctccatacgactcgatcatagaggcaaccatctcaaggactcgcccggtcttgatggcggcaaccacgactattttaggaatggtgcctttacttttcgacgtagcgttcggtggaatggcggcgactattatcttcggactcaccttcgccaccttacttacgttattcgtaaccccgacgttatacgcattgttttaccggattcattcacctcacaaataaacgataaaaatggacaaagtatatattatcagcggtctcttatccttcctatccttcccgttaatcgcacaaaacagcgattatcaagcgcaatatagggaaaaagtcttggaatacaaccaagacttgaaagcagcgggatacaacgaggccatgaaacaggaaatgatcaaatcggcccgtgcggatttcaaaccgaaactctcggcggaaggtaatttcaattataccggtaatccgctagaattatcgattgatttgccatctatgaattcccccctttattttcaaggtaaagatctgaaatatggggcgactctctccctctcgcaaccgatttataccggaggcggcattcgtgccaactaccaaaaagcacggcaagaaaaagagttggcatccaatgaatccgatcgtataaaaagcaataccctacacgacgccgatatctactattggaatgcggtagcccagcacgagctggttttcgtggcacaggcatttcgtacatccatacagcaactggtggacgtcgtacgccaccgggtagaagtcgaatacatcgatcgaaacgatcttcttatggcggaggtaaagctaaacgatgcagatttccagttattacaaactcgtgataacgccgagatcgcacgtttggcccttaattctttcgctggtgtaaacccgagcgataccttgccgatcgatcattccgtaatcgccctcaaacaatttatccctttatcggatgagatagataacgcgataaccagcaggccggaataccggatcgccaaaaacaagatcgagttacaggaatcatcccggaaaatagcggatgcccatttcttaccctaattccatattggagtagatggaagttattcctcaccgggctataacttcaaatccgacctagatccgaactatgcgatctacgccaagctcagtatcccgctcttcgaatggggaaaacgtaagagtacccgcaacgcttcctcgtacgccatcaatatggctcaacagaatctcagcaagacgcaagataagatccggctggaaatacaaaccgcccattacaactataaacaagctatcgataaagtcgaactaaccgagagctcattatcaaaagcatccgaaagtgagcaaatggccatgaagcgttataaggaggggaatgtttccatcgtcgaggttatcaacgctcaattatatcatcagcaagctcaggttaattatatacaatccaaactaaacgcacagatggcgaagacggatttcgaacgggcaatttattatcttcgcaaaaaagaataggtcatgaaagaaatatcatacgggaaatcggcatgtatccttttgttttcggcattaggggtcttttcctatttcttgctgttatatcatacggagctacaagagcgcatccccgatataaagatctcattgatcgctttgtccatcacgatagcggtattcaacttgttcggtttcagtttactggtcagcagccattggatggctaccaactatccattatattatatcgataaaagccggatgttatggcattatctgctggtagcgatcctattgctacttatgaattgtaccctgtttatctcgttgaaatggatcacaagcattggcgatcctttcgtgatccgggcaaaaggggccggtttggtaatagccgtctggttcgtggagatgatcattttcagccttctcttgattaattattcgatgcgttatacattgaatttatataaggagaaacaaagattggaagcagaatctatacaagctaaatataccgctctccaaagccagctaaatcctcatttcctattcaatagcttgaatacattgatagcagagatagagtatgatccggctacggcggtcaagtttacgcagcatctatccgaggtataccgttacgtgctccgccagcaacagtgccagatcgtctctttaaaagaggagcttgattttctggattcctatatattcctccatcaagtccggctgggagattgtttgtcgttggaacgcgatcttcccgacaacgtcattgaccatcaattgccccctctgacactgcaactactagccgagaatgtcgtgaaacataattatatcgacgattttaacccgatgaccatacgggtatatactgaaaggaacagtcgatatctatgcgtcagcaatacattacggcctaaaaaagtctcaaacgcatccggtaaaggattaaagaatttgtcggagcgttatcaattactatgtaagcaggatatccagatccgaaaaaatgatcaccaattcaccgtatcaatcccacttatttatgaataatatccaagtagccattatcgaagatgagaaaccggccgcccggttactggaaggtatgataaagaaattacgcccgcaatgggatatcatcaagatacccggaagcatcgaatcatccgtggcttggttcgcttcccatccgcatccggatatcgtttttctggatatccagttgtcggatggaaattcttttttatttatagaacaggcttgtcctacaagtctcattatctttacgaccgcttacgatgaatatgcagtccgggcctttacggtaaacagtattgattatctactcaaaccgatacgacaagagagattggaggaagccatccaaaaattcgagcatgtcacgtctaagtacaaccagaagctcttagagcaaaatgatttattggaagtactccattccctcacgtatcccggcaagaaatacaggacccgtttccttatttccggcaacgagaaactgatcactttacaggtggaggatatcgcccacttttattcattaaacaagatcaccttcgctgtcacacgccaaaacaaggagtacataatcgatttcccgctggataaactcatggaacaattagatcccgataaatttttccggacgaaccggcagacgatcataaatatcgaatccatcgtgaaaatagagccctattttcagaataaggtcattgtccacataaagccggaacataaagagaaaatattggtcagcaaagaaaaatgggcctctttcaagctatggttgaattattagacctttcgcccattactataataccgttcttttctatcgtcccgatccttcttattctttttaggtttgggcttatccggtttcgctggtttccgatagtcatgacgatggttgtcacgatcccaatgtctatctgagtcatgccggtcgtctctccaatgattgtcatggtgaatggtaccccagcggtaattccaatagttatcctcatatcgacggcagtcatgggacgggcggcgatccggatatctcggattcgcataccatccccgataatcatggatacgttgcggatgctcccttacaaaacggacatatagattgaactgggccggagtcaatagacgttggatcttacgatccctttccatacgcaaatcgtaaatacggcgagccgcacggtcccaataccgatagtcacggcgggcctccttctctattttctgtccgtacttatggataatcttatggtattccgctgcttggcgagcgggcaaatgcatcgcttgctccatccaaagacaattttgacaatgcggttcattccacccaaaactgatccaaaactggctgtaagcgggtaaactgcacaatatagccaacacacatagtaagctgaatcgtttcatgtcttttcaattttaagttaataataaagcgaatcgtttgttcttttatctaagactgccctacttcagaaaggtttaatccttgatacccaacaaatctttcgcattggcaagagaagcctctgtcaacgaggctccgctcaacatacgggccacctcgttcacacgttcctccccctctaattgcttgatacgggtcagcgtacggtctttggtatccttcttataaacaaaataatgagcttgccccttcgccgctatctgaggtaagtgagtgatagcgaaaacttgcatctttgttccgagttcttgcatgatatcccccattttatcggcgatatcacccgatacccccgtatctacctcatcaaagataatagtaggtaaagcggtgaacccggcaatcatagccttaatgcagagcatcaaccgggagatctcacctccggaagcggtttgggctaccggctgcaattccgcgctcttattggcggagaacataaatcggatatcgtccattccatcgctctccggctctttgcgaggaaggatgtccacacggaaacgggtattcggcatccccaacggaataatcatcttgaccaattgcgaggccatcgccgtggaagcgactttacgctgctcgctaagcacggaggcttgttgaagcaactctttatacgaggcatccaattgactctctaacaaaccgatttgctcatcgaaagaatcgatcgcacgcaattgctcttggtattgatcccgtatagcaatcaattcatccacggtggagacacggtgtttttgcagaagtgtataaaggatattcaagcgttcattcacccattccaatcgttccgggttgaactctacatcttcctttaaaacgtctgtctcggaagccagatcattcaagtcgatataagccgagcggattcgctcggagatctccttggctttcgggaaatatctttctaaggaatccacggtggaaagggcttccttgagtatttggatggctccttgctcctcgccgtccaagagttcggttaccttatataaagagcttttgatctcctccgcatgcgagagagtttcttgctcttgctccaactcatcctgctcatccggttgaaggttggcttcgtccaattgttccaattgaaaacggatatagtcctcctcctgcttgctttgagccgctttgtccctcaaatctttcagttcccttcgcaacgcctgataacgggtaaattccttcttataaagaatgagcaagatctcattttcggccattacatcgatcactttcagctggaaacggttgtcgcccaacaataggttctgatgctgcgaatggatatcgatcaagcggcttcccaactcttttaagatcgtaagggaaaccggagaatcattgacgaaggcacgggatttgccggaggcataaagttcccgacgcaagatacagctatccgcgtcgtactcaaggtcgttacttaggaagaaaggctccaactgatattttgagacatcaaatacggcctcgatcacacatttatccgaacctttctttatactcttgccatccgcacgctgtcccagcaccaaagacaaggctcctaatataattgattttcccgctccggtctcacccgttatcaccgagaagcctttatcaaagcggatatccaaattgtctatcaagacaaagttctgtataaataaggatttcaacataactattttaccttactggtttttgaagctcttccaagcgagtggattgtgccggatagatctcgaacagcatcttatagccctcttgccgctcttgtgtggtcgctttcgaataaatcgcgataatctcatctaatttagcgtcggcgaacatttgtagaagcacagaggtaggccgggctttctttacttcctgcaaggcgggaagcgcactaatgatcgtcgtacgtccacgatccggatttgctgccatttcatcgagtcctttccggtgatacgtgtaccacatttcccggaaagcgtcggatgcgttatcttgcaaagccgtcgctacggcatggcggttctggttgctatcaaaagctttccagcccgtccacgacatctcagactgggccatgttcacgatttgctgggcttgttgtatataagtagttccacctttcggagcgaaactatcgaaatcaagccccaagatcacatagacgtaaaacacgatagtggccgtaagattgctggtcagcgtatttgagttatagtccaacggctcgccctccgtatactcaaaatccaactgttgatccctgaaattcagaagagtagttgtataactggaattatagaccggacggcgggcttgtatctggatctcgctcttgaagttcgtctcatccaattcattcacgataatcgtcatcgtacaatcgatcttctcattgacggcaaacgtggcatccgtccatttccggttattcacgaactcagtcaaggagttctgcaaggtcgtgaagatttgcttgttagcggtcgcaattttgtctccgttcaccgtgatacgggcgttcaactcttgcgccttcccacaaaaaggagcggcgcaaagcatgaatagataaaacagtcttcttacttttctcatttcaataatgttaccaacttatttacgatatcacaggctacctcccgcttcgttttgagcggatagctcgttactcctccggcattgtcgataatcgtgatcttattggtatcgcaacggaaaccggcaccttggtctcgtaaagaattcaagacgatgaaatcgagattcttccgcttcagtttaccttcggcatgagtagcctcgtcgttcgtctccaaggcgaaccccaccatgacctgtccttcccgcttgatcgcacccaaagaggcggcgatatccgggttcggaaccaaatgaagcgtcatctctctctccgtttcccgtttgatcttctgctcggaagcattctccggacggtaatcggcgacagcggcacataatatggcagcatcgctactcgggaatgcggtcatcgccgcttggtacatttccccggcagactcaacatcgattcgtttaatagctggatgatgtgtttttaaagagactggaccagcgaccaaagtcacctccgcccctctctccgcacaagcttccgctaaagcgaaccccatcttaccggaagagtaattacctataaaacgtacgggatctatcttttcatatgtcggacctgctgttattaagatcttttttttttcaagatctttttgagcggaaaagaagtcttccaaaacctcgataatcttatcgggttcttccatccggcctttaccaaccaaatggctcgccaattccccctcggcaggttcgataatccggttaccgaatgaacgcaagcgctccagattctgttgggtactcggatgagcgaacatatccaaatccatggccggagccacgaatacaggggctttacaagaaagataagtagttatcagcatattatcggcgattccgttcgccatcttaccgatcgtggaagcggtagccggagcaatcaacatggcatccgcccaaagccccagatccacatgactattccatgtaccatccctattggaaaaaaactcgcagattacagggtggctactcaacgtcgataacgtaagcggagtgataaactcttttcccgccggcgtgataaccacttgtacctcggctccttttttcaccaatccccggatgatataagcggctttgtatgcggctatactccccgtaatccctaatataatatgtttatctttcaatatcatatatcgaatcaatttatctttgccagtagagacgtagcacgttgcgtctctacaacctcaacaaaagaatctctttggctacttttgagtttatattgccatattcgccaagtttccatcccattcgatcgataggttccaccaaagcatccaagtcggactccttgatcccatagtcggaaagacgggtctttaatcccatgaaatggaaaaaatcttccgtagcctctattgacttttgcgccttttcatcggcagatccttcggtaataccaaatatgacctctcccatccggatcagtttcgccgctttctccttacgcatataggtcatgacacccggcaagataaccgccaaagtctgggcatgatccaagccgaactgcgccgtcaatgcatatcccatacggtgtgaggaccagtcttggggtactccttggccgatccaacagttcaaggcattcgtagccgcccacatcaaattagcacgaatatcataatcattcggattttgcaagaccttgcggccttcttccacaattgtcttcatcaatccctcggcaaaataatcttgaaccttagcgttcaccggataagtcaggtattgctcgaccacatggataaacgagtcaacgacaccgttagccacctgtcgctcaggtaaagaataagttacctgcggatctaagatagcgaacttagggaacaccaacggagacatgaaattcaatttctcatggacagattcccgggaaattaccgcccgttcattcatttccgaaccggtagcggccaaagtcagcactactcctaaaggaagcgctttctttatcacgccacctttcgacaagatatcccaaggatctccctcgaaaaacgtagccgaagcgataaatttcgtagcgtcgatcactgatccgccgcctaccgccagcaagaaatcgatattctcccccttcaccaactcaacagccttcatacaagtctcataacggggattcgcctcaataccaccaaactcataggtatggaagtctttcaaagctgccgtcacctgctcataaatgccatttttcttaatgctaccgccaccgtataccaccagaaccttacttccttctggaagtaacgcagacaaacgggcaatacttcctttgccgaacacaacctttacaggattgcaaaactcaaaattattcatcgccttattttgaattaaagtctctcaaacggatctctgtcaacattttcttcgtattcaacgggaaatcgccattcatgatccaagaataataacccggatccgacttcaagatctccgttaccaaacggcctttatacttaccgaagttaataacctcctcgcctttatcgttgtaaaccatacgtccggcgaaatccacattattcgagtagcaggaatattgggaaaggaaagcaacgtcattcttcaaatccggatagcgatccagctgcgctttcaacacctcatatgtagccaacgtatcagcctcagccgtatgagcgttctccaagcttttattgcaatagaatttataagcggcagataacgtacgttgctccatcttatggaaaatcgtctgtacatcgataaatttgcgccggttcaaatcgatatccacacccgcacgcagaaactcctcggcaagcatgggtatatcaaaacggttggaattatatccggccaaatcacaaccctcgatctgggttgccaaagatttagcgatctccttaaaggtcggacaatcttttacatcttcatcggttatgccatgaatagcggtagattcggggggaataggcataccgggatttatccggcgtgtcttcgtttcttctttcccatttgggaagaccttcacgtaggaaatctctacgatacggtcctttacgatatttatacccgtggtctctaaatcaaaaaagaccagcgggttccttaagtttaactgcattatttatttattagtcattcaacatcatcggcatcagcaacatgagcaagtcctcgtcctcatcattctcagaaggaacgatcaagccggcacgtgaagggtccgctaattctaatacaatctcttccgagctgatatttccaaggatctcgatcagatatgtagccttaaaaccgatgcttaactccgtcccgtcaaactgacaaacaatacgctcttccgcagaagtggagaaatcgatatcttgggcggaaaccgtaatcaagctatccttcaagtgcaacttcaccaagctgctcgccggattagaaaagacagaaacacgctttaaagcattcaagaaagagatacgatcgatcgttaccttaaacgggttttcttgaggaatcacactattatagttcgggtaacgcccctcgatcaaacgacaaaccatctcgaagttcgtgcaagtaatatacgcattgttatcatcaaacttaatcaatacttgctccgactccttcgccaacaaattcttcaataaattagccggcttcttcggcaaaatgaaagaagcccgttccggggatttcaccgccaagttacgcaagcgaaccaatttatgtccgtctgatgccacgaacgtcaaatcatccgtatggatatcgaaatagacaccattcattacagggcgaagctcatcatcggccgtggcgaacaaggaacgactgatgccgtttaacagcatctgggcatccatcgagatagagatagcgttatcattcaacggcttctgctgcggatatgtgtcccctttctgaccgataaaattatacttaccattctggaaatgaatgaaaatctccaaattctcatcattgatatcaaaagtaagcggttgttcgggaagctctttcagcggatcgagcagtatcttggcggaaaccgcaaagagtccggcaccttgggcattcatgacgtctacggaagtcaccaaccgggtctcggcatcggaagctgtcaccgtaagcgtatttccttctaggttaaaaaggaagctgtccagaatcggtaaagagttcttggaagcgataaccttgcttatagactgtaaacgtgataataacgcagtgctggatacatcgaatctcatagctttaattattttatcttgttatattattatttcacacaaactaccatttggataggaagagacgcggcatgcctcatctctacaaattaacccaacaaaattaagaaaatattttatttgtaaccaactatactttcaaaagtttagggtacaaaaaaagcttccctccgctttatcggagagaagcctcttatattctttattattcgctacttaattatttagcgaaataatcttttaccgcttcgttagggatcatttcttcttggaagatgtatgcacctgttttcggagacttaaccattttaatcactttggaataagtacgaccgtcacctttcttaaatgttgcaactgctttttttgccatcgtttaaaatctcctattacttaatttctttgtgtaacgtcatcttcttcaaaaccggattgtatttcatcaattccaatctctgagtagtattctttctattcttcgtagtgatatagcgagacatacccggcattccactttccttgtgctctgtacactcaaggattacctgtactctatttccttttgctttttttgccattttctatatcctccacaaattatgcgttcaaataacctttttcagccgccatcttgatagccgcatccaaacctaacttattgattgtacgtaagccagccgcagatatattcaagctaacccagcaatcctgctctacccagtagaacttcttcgtaaacaggttgacattgaacttacgcttcgttcttctctttgagtgagaaacgttgtttccaaccattgctctctttccagtaatttgacaaattttagacatttctaatctgttcttttaaattatacgaaatttaagtcaactcctgctatgtgtcttccctttctgaactagcatcatgaacaaaaacgaagattctaatagagtcttatctttacagggtgcaaaggtaagaattattttgatttatctgcaagaattctcaaatattttttcctcaacaaatcatgtcttaaattagttataggtatataacaacataacatgatattcattatggcaagaagttttaaagaagcgatccagcatcgccggacacattatggaataggtaacaactctcccatttccgacaacgagattcatgagattattaagacagcggtcactcacgttccctccgcattcaattcgcagtctacgagaatcgtactgctactgggtgaaagccacaagaagctttgggaaatcgtaaaagacacgcttcgtaaaatcgtccccgccgaagcctataaggctaccgaggtaaagatagataattctttcgaggctggctatggcacggtcctctttttcgaggatacagcggtagtagaaggcttacagaagcaatttccttcttacaaagagaatttcccggtatggtcccaacagacatcggctatgcatcaattcgcggtatggactatgctggaagacgccggcttcggcgcttctttgcaacattacaacccgttgatcgacgaggcggtcgctaaacaatggcatatcaatccgaactggaaactgatcgccgagatgccgttcggaacctctacccaggaaccgggagaaaaacaattcgccccattagaggaacgaattttagtattcaaataattataataatgtatatggaatatgacatagcaatcataggcggtggacctgcgggttacaccgccgccgaaagggcttcggagaatggattaaaaacgatccttttcgagaagaacgctatcggtggcgtctgcctaaacgagggatgtatcccgacaaaaactcttttatactccgccaagatactagacagtatcaaaagtgcctccaaatatggtatagtggcgatgaaagacccaagtttcgacttggcaaagattatcgaccggaagaacaagaccgtccgtaaacttacgctcggggtaaaagcccggcttacgggtaacggcgtcaccatcgtagaaggagaggcacgaatcaccggagaggagtttggaaatatacggattcactgcgatggaaaagagtatttagtgaagaatgtgttagtatgcacaggctctgaaaccgtgatccctcctatcaaagggttatcagaggtcaagtattggacttcccgggaagcccttgatctcaacgatttgccaaaatcgttagcgattatcggtggtggcgtgatcggaatggagttcgcctcattctttaacagtatgggcgtaaaggtgaaggtaatcgagatgctacccgagatattagggaatatggataaagaaacctcagcgatgcttcgatccgagtataagaaaaaaggcgtagagtttttcttgaataccaaagttacagaggtatcggcagagaaagtctttgttgagaaaaacggcaaggcagacacgattgaagccgataaaatattggtgagcgtgggccgccgtccgattacaaagagtctgggactcgaaaatctagcgatcgaaatacaaggggccggtgtaaaggtaaacgaacatatgctgacttcccatccacatgtatatgcggctggagatattaccggtttttccctgctggcacatacggcttaccgggaagcggaagttgccatacaccatatcctaggcataccggacgagatgagctataaagccattccggcggtagtttatacgaatccggaattggcgagcgtgggtaagacagaagaggaattgatagcgaatggggaaagttttcgtgttcaaaagatcccgatgacctattccggacgtttcgtcgcagagaacgagaatggtaatggtttatgtaaactgatcacggacgacgaggatcgtatcatcggttgccatctactagggaatccggcatccgagattatcgtcaccgccggaatcgctgtcgagaatggttatacagtcgatgaatttaagaaaaatattttcccgcatccgacagtcagtgagatcctccacgaaagtttatatatctaataaaacgcctaactaaaacagtttcctgatgctttgcattcacaatacacaaacggatccatacttcaatttggccgccgaagagtatctgctcaagaatttcaaagagaatattttcatgctttggcagaatgaaccatcaatcgtgatcggtaagcatcaggatgtatgggccgaggtaaatctcaaattcgtacaagaccaacaaatcaagatagcacgcaggttttccggtggtggtgccgtttaccatgatccgggaaacctgaatcttacatttatagagaccggccagattatgcagaccgacaaatataccatccagatcatgaattttctcaagacattgggagtacatgtcgaggtggatgaacggaaaggattaactatcggaggatttaaaatatcgggtagcgcacagagtatccataagaatcggtatatgcaccatgcgaccttattgttttccaccgatctggataggcttgtcacctccttgaaaagtacatcccgtcaagcaccagagaaaacaggaggtaaacgatcgacattcgttaaatctgtacggagtccggtcacgaatatcagcgcccatcttccggcttctatctctatccagcattttaagaaagcgcttctttactatttcacgatcaataatcccggcatacaggattattccttcacacaagcagacttggaagccatctatcggcttaaagagcagaaatatgctacagccagctggaactttaacacttatacactataatacagaaacttaccttcttgatctttgttcttattatataccgtttgtagagacggggcacgccccgtctcccactatataacagtaattaaaaaatcaaaatatggctacatttgagataaagatgcctaagttgggcgaaagtattacagaaggaaccatcatctcatggtcggtaaaggtaggtgataccgtagaggaagatgatgtccttttcgaagtaagcacagcgaaagtaagcgctgagattccatcccccgttgagggaaaagtaaaacaacttctttttaatgagggagacaccgtagcggtcggtacagtcgtagcgatccttgagatcgaaggtgaaggagaggataacggagctcagccggaaacctcggaggctactcaaccgaaagaacaagtcaccgctcccgcctcagaggaattatcaaagaattcccaagaggaagatcgttggtattctcccgtcgtattgcaattagcgaaaacggccggtgtatcgcaagatgaactggatcatattccgggtaccggatacctaggacgtctcagcaagaaagatattcaaacgtatatcgatcacaaaaataaaggtacggaaatgccgaagccgaaacaggctcctgtttcttccatgcagcaaacggctacgagcacgccaacaattacggtagcgccgccgaccgctccttccatgcctatgacagcggccactccatccgctccactcgcccaaggagacgaggtgagagaaatggatcgtgtacgtaagatcattgcggaccatatggtattatcgaaaaaagtatctccgcatgtgacgtcggttatcgaggtagacgtgacccgactggttaactggcgtaaaaaagtgaaggatcaattcttcaagcaagaaggcatcaacctaacttatatgccggctattaccgaagcgaccgccaaagcgttgaaagcctatccattagtaaattcatccgtggacggttacaatatcatcctaaagaagcctattaatataggtatagcggtttccttaaacgacggaaatttaattgtcccggttatacacgatgccgataagctgaacctaagtggcctcgcctcacaaatagataccttggcggctaaagcccgtgagaataagctcgccccggatagcatccaaggcggaacgttcacgattacgaatttcggaaccttcaagagtctgttcggcaccccgatcatcaatcagcctcaagtagcgatcctagccgtcggttatatcgagaagaagcctgcggtagtagagacgcccgagggagacacgatcgctatccgtcacaagatgtacctctcactctcctacgatcatcgtatcgtggacggagctttggcgggagcctttttacgttccatcgccgacgaactagagaattggaacgcttaatacattattataatagaacaacatgaaaaagtatgatataaaaacaacagataaggagactctcaggaaatggttttaccttatgacgctcggaagggcgatcgatgagaaggctccctcctatttattgcaatctctcggctggtcttatcatgccccgtatgccgggcacgacgggatacaactcgccatgggacaagtattcgataaggatacggactttctcttcccctattaccgggatatgttgacggttctctcggcgggaatgaccgccgaggagatcatcctgaacggtatctccaaggcgaccgatctgaccagtggcggccgccacatgtctaaccacttctctaagatggaatggcatatcgagaacgtttcttccgctacggcgactcacgatctccatgccgccggcgtggcacgggcgatggtttactatggacagaaaggcgtagcgattacctcgcacggtgaatcggccgcttccgaaggctatgtgtatgaggcaatcaatggcgccagcaatgagcgactgccggttatctttgtcttccaagacaatggatatggtatctctgtccccaaaaaggaccagacggccaatcgtaaagttgccgataacttctctggcttcaagaatttacgtattatccattgcaatggaaaagacgtgttcgattccatgaatgccatgaccgaggccaaagagtacgcgatcgccaaccggactcccgtaatcgttcaggccaattgcgtacggataggctcccactcaaactccgataaacataccttgtatcgtgatgagaacgagcttacctatgtaaaatccgccgatcctttatacaaattccatcgcatgctgattcgttacggacgtttcaccgaggaagaattgaaagagatcgcggatctagcggctaaagacctgaaagccgccaatcggaaagcgatggccgcccccgatcccgatccgtctaccgtcaaggattacgtcctcccggaaccttatcaacctcaaaaatacaaagaaggtgttcaaaacgaggaaggagagaaagaaacgctagttacggcgatcaacaagacgttgaaagcggagttccggcacaacccggatacgtttatctggggacaggatgtagccaataaagaaaagggtggcgtattcaacatcacgaaaggcatgcagcaagaattcggtatcgagcgagtcttcaacgcccctatcgccgaggattatatcgtagggacagcgaacggtatgtgccgctttgacccgaagatccatgtagtgatcgagggcgcggaattcgccgattacttctggccggccgtcgagcaatacgtggaatgtacgcatgagtattggcgcagcaacgggcaatttaccccaaacatcactttgcgcctagcctccggaggctatatcggaggagggctttatcattcccagaccattgagggcgcattgacctcattacccggtgcccggattgtttatccctctttcgcggatgatgccgccggactgttgcggacgagtatgcgttctaaaggctttacgctctatctggaaccgaaagcgctctacaacgcggtagaagcctccacctttgtccccgaggatttcgaggttccgtttgggaaagcccgtatccgccgtccgggaaaagatctgacaatcatcacttatggcaatacgacccatctttgcctcaacgtagccgagcttctttacaaggagaaaggctgggaactggaggttatcgatcttcgtaccttgataccattggataaagaggcgatcttcaactcggtgaagaaaaccagtaaagtattgatcgtacatgaggacaaggtcttctctggcttcggagcggaaattgccggcatcatcggctcggaactattccagtacttggatgctccgatccaacgggtaggttccctattcactccggttggtttccatccggtcttggaacgggccatcctccccaacgaggagaccatctatcatgcggcaaaagaactgctgctttattagatccacattcgttaaatctttaaaagcatcacaatgaaaacaggattattttacggaacgggcacagagaaaacaacctttgtcgccaataaaataagaaaagctttcggggaggatcagatcgatatcatccctattgaaagcgcatggaaaagagatttcgaggcttacgaccatataatcgcaggaacctctacttggttcgatggcgagcttcccacctattgggacgagatcatcccggaactggtcactttagaccttaaaaataagaaggtcgctattttcggtcttggagatcaaacgaattatccggataatttcgccgatggagtcggcatattggcggacgctttcacctcctgtggagcgactttagtaggcgagacctcttcggatgattatttctttaatgcctccaaagccttgaaaaatggcaaactactaggcttagtcctcgatttggaaaaccaaccggatcaaaccgacaaacgaatcgagcgatgggtgaagcaattgaaggaggcgtttggataaagaagaatgcatcttaaactcgtaaacgagaactaaacagaaagcgtaacgaatcactccacgggtttgttacgccttcattctatacacctgtctttcatacacatactgtgccaacatctaccatcgccttggcacagctgtgccacgctgatggcatacccgtgccatagtgatggcaagcccgtgccacgccgatggcaaagctgtgccacctagatggcaaacatactttattagcgagacactaattagttaaacatttgactaatccgagaaaaaacgctatcttcgcgcccagcaagtttaaaagaattataagtaatggtagaaggtaaagaattccgggaacttatgttacaagttgtccgcacacgcatggcatttcgtcggtctatgcaacgaacgctgaaaaagaacaacgccggtataacatttgagatgcttcaaatcttgagttgcctatggcacgaacaaggtatcacccaacaggtcttggcagagagaacggcaaaggataaggcttgtctgacaaacctaatgaacaatttagagaagaaaggctacgtccatcggaaagaagatcccgaggaccggaggaacaaactggttttcctaaccccggaaggagaagaattcaaaaagcaaattcgcccgatccttgatcaggtttatgtacatgcggagcatattatcggaatagagaacgtagaaaccatgttatccgaattaaaagcagtacataatgtccttgagaatatataaaaagcacgtattgagcctcttttgtatgacggtcgctacatttccggcaatcgcccaaaccgattcgctcttcttgaccatcgaccagcttttcgagagaggcgtacggcatagtctgcagatccaagcagacgtcttaaaagaatcgatagcgcaagagagaacccatacggcacgttccgcacaattgccagacctgcaaatcggcttgaaaggtggatatgtagggcaaccgatcctctttgagcaaggactcgcccatccgactcgcccggaagcgcccgattggtcccagaactatgccatcgaccttacccaaccgatataccaaggcggtaaaatccggtattccatccggaaagcggatctggagaaagaagtcgcctctttacaaacgctcacagaccagagtgagatcaagctcggtctattaaatcaatacatcggtcttttcagcctgtttaaacaacgtgaggtgctttcccgtaatatcgaggaatcggaacgccgcctacaagatatccggcgtatgaaaaaagagggactgataaccaataacgacgtattaagaagcgagatgcaattaaccaacgaccgcctatccttgcaagaaacggataatagcctcatactggtatcacagcaattggatatcctgatcggtctcgatgagaatctattgctcaaaccagataccacgttactggaccaaaccgtatctttagaaacttacgaagattatgtagcccaagcctattccaatgatccggcgatacgtctactccggaaacaaacagagttagcccaaaatgatatacgtttgactaaagcctcctcgctacccagcctatcgctatatgcgtcgaacacattggcacgtccagtctcccgaacattagcggatatgtacaataacaactggaacataggactgtcgctctcctaccctttatcctctttatataaaaacaaccataaaataaaggaaagcaaatggatggtctcgttacataaaaacgaggaggaacagaaaaagcagaaaatccgcatggaagtacgcaccgcgttcttacgtcataaggaggccctacaagaagtggaagccttgaagttatccgtacggcaagctcaagagaactacaggatcatgcaaaaccgctatttaaaccaattggcgatcctaaccgacttactcgacgcgaactcggttctcctcaacgcggagctacagctcacgaatgcccgtacccacgtgatttacacttactatcaactacagaaggcttgcggccgtctctaaaaagaaacaacgactatggcaaacgaattaaaagagaaacatcaaagactaaagaaagtaaggacacggaatatagtattaaactccatatgtatccttttagccggttccggcatttggtggacagccaattatttctggcgttacatcaattatgaggtgacaaacgatgcctttgtggaccaatatatcgccccactaaatatacgtgcctccggctacataaaagaggtccgtttcaaggaacaccagtacgttcaccaaggggacacacttctcatactggacgatcgggaatatcggatcaagttaaaagaggcagaggccgcgttgatcgatgcccaaggatcacaagacgtacttcgttccggtatcgagacctcccatacgaacatcgccgtacaagacgccaacatcgccgaagctaaagccaagctttggcaactggaacaggattatcaccgatttgagcggctgctgaaagaagaatcggtccccgagcaacaatacgagcaatccaaagccgctttcgaggcggcgcaagcccgatatcaggcgttggtggaacaaaagaaagccgctttctcccaattcaccgaaaccagcaagaagacaacaggagccgaggcggcgatcttacgaaaagaagcggatctggatttagcgaggttaaacctttcctataccgttataaccgccccttacgacggtcatgtaggcagacggaccttagagcccggacaatacgtgcaagccggacaaacgatatcctacctcgtacgagataaagacaaatggatcacggccaattacaaggagacccagatcccccacatctatatcgggcaaaaagtacgtatcaaggtagacgcgttgccgggaaagatattcaacggggaggtaaccgcaatctccgacgccacaggctccaaatactcattggtcccgaccgacaattccgccggaaacttcgtcaaggtacaacaacgtatcccggtacggatagacttggaaaatctatcgcaagaagatacgcaatacttaagagcaggcatgatggttgaaacagaagccttacgcaaatgatcacgatgaaagagcttggggcaccgatccgccaatgggtgccggactggttaggattgatttgcatcttcatcgttatccttccggttacgatgctaaacggttcgtacaccggcagtatgctggaggtatcaaacacgctaggcacgaacaccgaggatataaccatgggatattacgcggcagcggcgggaatggcggtatcctatccgattattccgaagatattagaagccttctctataaaattcttattgttagcggatttagtcgcccagttcttcttaagctggatctgtgcccgctcccagaacgccgacatattgatcgtctgtagtttcgcgatcggtttcctgaaagggtttctcatgctgtggtttatccggtacgcacaaaagatattcagccctaaaaatatacgtagccaattctattcctacttctatccttttgttttcggagggggacaagcgtccatgcttgttaccgcacagttagcctaccattacgactggaaatatatgtattacttcatgatgctaatgattttattggccatagtaatggtaatcatctgcttccgccataaccggccgatcaagtccatccccttggccgatctacacatccgggaaatgttcatcatatccaccggattgttaatgcttatgtatgtcattaattacgggaaagtactcgactggatggcatcccccaagatttgcctttatatcatgatcgccccgatattgatcgctttatttatttggtatcaatatcattcggaacgtccgtacgtgaatctggcgcctttataccagccgaaagccattatcggttatttctatatgatgcttgtcatgtttttcagtacttcgactaccttgttgaccagctacctgaccagtatcttaaaggtagacagtacccatacctattccctttatacttatttgcttccgggatatgtcttgggggcgttcatctgtttttggtggttccggtggcaacgttggcggtttcgtttcttgatagcgggaggaatgagttgtttcgtcctgttcttcgggagcctttatttcgggatctcaccggatagcagatacgagatgctctactttcctatattcctcaagggattgggcatgatgattctaatcatagctttcgccttatttgccgtggaagatttaaatcctaaatatttattgtcaaacgctttctttctcatcattttccgttcggtactatcccctatcatggcgacttctttttacagtaatatactatatcgcttggaacaaaaatatatgtattccttatcagaaaccgttacgctggccgatcctctagccgcctcacgctataatcaggcgcttggcaacgccttgacccaagggcatccctacgacgaggcagcgcaaatggctaccaatacactctataatacgttacagcaacaaagcttattattggcgttaaaagagatactggggtatttattagtcatctccttattcatagcgatcgtatctcgttttatcccattccataaaaccatccgtgttacattcgccaagacaggagatgatatggtttgatcaaactatgcccggctgcaaatctatcagccggcatctgcctttttgtcatttatagtttatccgaaacattttggcattcgttttgtataggaataggcggatcttgagaatgatcaggatcaggaatacgcacaaaataacaataaaaataataagatattcagactatgagcagtaaacaaggtaacatcggagtaacatcggaaaacatctttccgattatcaagaagttcttatacagtgatcacgaaatcttccttcgtgaacttgtttctaatgcggtagacgctacccagaagttaaaaacgctttcttccgtaggcgagtttaaaggcgaactcggtgatttgaccgtacaggttaagttcgatgacaaaacgatcacgatctctgaccggggtatcggtatgacagccgaggagatcgataagtacatcaaccagatcgctttctccggcgccgaggagttcgttgagaaatacaagaacgacgccgcttctatcatcggtcacttcggtcttggtttctactcctctttcatggtttccaagaaagtagagatcgtgacgaaatcgtacaaagaaggcgctgttcccatgaaatggagctgcgacggtacaccggaatactccttggaggaaacgacgaaagaggatcgtggtaccgatattatcctgtatatagacgacgagaataaagatttcttgaacaaggataagatcaatggcttattgacaaaatactgccgtttcttaccggttcctatcgcattcggcaagaagcaagagtggaaggatggcaaatatgtagatacggacgaagataacgtaatcaacgacaccaaaccggcatgggttcgcaaaccggccgatatgaccgacgaggattacaagaagttctatcgtgacttatatcctatgacggatgagccgttgttctggattcacttgaacgtagactatccgttcaacttgaccggtatcttatatttccctcgcatcaagagcaatatcgacttgcatcgtaacaagatccagttatattgcaaccaagtattcgttacggattccgtagagggtatcgttcctgagttcttgacattattgcatggtgtattggattcgccggatatcccgttgaacgtatcccgttcctatttgcaaagcgatcagaacgtgaagaagatctccaaccacatcacgaagaaggtggcagaccgcttggaagagatcttcaagaacgaccgcccgcagttcgaggagaaatgggatagcttgaaactattcatccaatatggtatgttgactgatgagaagttctacgaccgtgcggttaagttcgccttattcaaggacgtcgaaggcaaatacttcactttcgaggaatacaagaacttaatcaaggacaaccagacagacaaagagggtaacttaatctatctgtataccaccaataaagacgagcaatacagctatatacaagccgcaaaggacaaaggttacagcgtcttggaaatggacggacaattggatgtacacttgatcggacaattggagcagaagttcgagaagagccgcttcgttcgtgtggatagcgatacgatcgataacctgatccgcaaggaagactcgaataaggtaaccttgagcgaggagcagaaaatggccatgcaggaagtattcaagagtcagatgccgaaattgaacaagaccgagttctacgtaacattcgaggcattgggagaaaacgcgaaccctgtcatgttgacacaaagcgagtatatgcgaagaatgcgtgagatgtccgctatgcaaccgggtatgtctttctatggcgagatgccggatagcttcaacttcgtattgaatacggatcatccgttgatcaagaaagtattaactgaagaggagcaagcttgcgacgagaagttaaaaccgatccttagcgatatcaaaggatgggaggctcgtcaagccgacttacgtgaggctcaaagcaaaaagaaagaagatgagatcacggcgcaagagaaagaggatatgaccaacaccaaccataagctggatgagcttcgtgagcaacgcaaccaagttctcgccgagtacgccggtacgaacaagacagttagtcagttgatcgaccttgctttgttaggaaacggtatgctgaagggagaggccttaagccaattcatcaaacgtagcgtagaactgatcggataaaccaatcctcacatatataaaaaaccgttccttctcgggggaacggtttttttagtttcagcccacgacatcctcgaccactttccgcaacctatccaagttcatctcgccggattgtctccacaaagcctcccctttccgtagcaggataaaagtaggaatcgattccaccgtatacaaatcggcaagagcgctctcctcctcgatattgatttgtaccacttctaattttcctttctccaattccttgaactccttcacgatcggcatcattttctggcaatgagggcaccaatccgcataaaactcagccatgaccaaagcaccagtctccataacggtcttattccgctcttccctattcaattctttctctttcataacatcttctgttttaattgtattgataactcaacaatacgaaaaaacaaaatgtttatgtttctaaagaaatacttcttacatttggagaagaaaaacagattgggttcatatgaggaaaataacagttatcatagccttattccttgctgccattcagattgtttccgcccagaaagtagggttggtactcagtggcggcggtgccaaaggagcggcacatatcggagtgatcaaggcgctggaagaaaataatataccgatcgattacattaccggtacctccatcggggcgattatcggtagtttatacgccatgggatattcccccgaggagatgctggagctgatgctttccaaggagttctcctattggcaaacaggtacggtggaggagcaatatacctattatttcaaggagccttacccgaccccggaattcgcgcatttctccatcgatatgtccgattccctacagatcaaggctagcttcttaccgcaaagcttgatcaatcccatacagatgaatcaggcgttcatggccttgttctcgcaggcgacggcaaaggcggggtggaatttcgacaacctgtttgtccctttccgttgcgtggcctcggatatatatactaaaaagccgatcatctttaagaatggggatctgggagacgccgtacgtgcctccatgactttcccgtttttcttccagcccatatggaaagacagtattcctttattcgatggaggtatctacgataatttcccggtaggcccgatgaaagacgcgttccacccggatttcattttcggatcgacggtatcgggagggaataaaaagccttcggagaatccttataaccagatcgagaccatgatcatgcaaaagaccgattacgaggtaccggaggaagatggcatgatgattaaattcagttttcccaccgtctccttattggatttccagaaaggtaaggagcttatggacatcgggtataaacgtaccctttccatgatcgactccatcaagcaacgggttccccgggaagtgcctttaaatgaggttaccgaaagaagaaaagcctataaagagaaccttcccccgctgatcttccgcaatatttacgtgacgggcgtatccgaggcccagcgtaaatacatagaggcccaattacacagggatatcaataacgagttctccatggaagagttcaagcgggcttatttcaagatgctgacctattccaagattagggaaatcatgccgcatgccgtttataaccggaaagagaagaaattcgatctttacctggacgtgaagatgaaagaagagatcacggttggcttcggtggaaacgtatcgtctcatcaagcgaatcaattatacctaggattggggtatcaatatctgggacggttcgccgccgacgtaaactcgaactttcaagtgggtaactcctttagtggtgtcatgttgagtggccggatgtacctgcaaacgcaaatccccacttatttaaattggcaaggagtcttctcggacaagaaatacacggaaagccaatccctcttttatgaggatatagtgcccgccatgattaagcagaaagaactgtacatgaaactaaaattaggcttccccttcctcaaccacgcgaaagcggagatcgggttcgcctacggacggttgaacgatttctatttgcagagcaccacgatacctttcccgaatgcctctttcgaccatagctggtacgatttattcagcggctcgttaagtatcgagcaaaactcactcaacaccaaacaatacccgataagcggaaaacagcaattcctaatcgcccaatacgtaaccggtacggagaagtataccccatcccccacttccgccacgacggaagccccgattggtcgcaaagtgcatagctggctgcaactgaaagggcgctggaaccaataccagacgctgagcaaccgtttcaacttaggttatttggcggaaatggtcatatccagcaagaacctcatgaataactatacggctagcgtattacaggccccggcgtttaccccgacaccccatagcgagattgtattcaacgaggcgttccgggcgaaccaatatgtggcttttgggctttccccgatcttgaagttaagcaagcttctgcacttccggttggatatgtatggcttcgctccactctatgaaatacaaaagacggtgccggaaaacaacccgtatgtcggaatcccgcattatggtaagtttttgcactcgtttaattatatgggtgaagcggcggtcgtattgcaattgccattcttatgtatcagtctgtacgccaacggatacagttatccgaaggagaatttcaactttggcttaaacattggttacctgatcttcaatccaaaaatgttagattaaattcgcaaaaaagtagtcgaaacgtttgcatatttaaaacaaaaacgtacctttgcactcgcaatcacgaaacaatggccgcgtagctcaactgaatagagtagctgactacggatcagccggttacaggtttgaatcctgtcgcggtcaccattcgaagatagcaatagaatatatcttggctccttagctcaactgaatagagcatctgactacggatcagaaggttaaaggtttgaatcctttaggagtcacttgaatattcaaattcatttacagattggctcgctagctcaactgaatagagcatctgactacggatcagaaggttataggtttgaatcctatgcgagtcacttgagaatccttatttcatccagcgtcttcggaagcaatgaaataaggattttttcaatttctaccggtcgtatcattattattcatatattcgcagttaatacaaagaatattttatttaagataaaaggtaaacacttgaaagcacactataaaacttctatagccataagtctaatcgtcattatcgtattagtgatcttacgtaccactgttaccggacaagatagcatcaaattcatcgacgataccgatgatcagccaatcgatcaacaaaacagcgactctatagaccttcgttattccaatgagtaccaaagttggaaacaaacctcggacacgactttccgcagtttgtttaatgggaaccaacaagctgatatcttggccgaacatcccggaatgatggtattatgggcaggatacgctttctccaaagattatctaagtcccagagggcatatgtattccatagaagatctatacaaaagcctgcggaccggcgctcccatgaccccgacgagtggtccccagcctgccgcatgctgggcatgtaaaagtccggacataccccgcttattaacgaccaccgatgccaagaccttatataagaagaaatgggcggagctaggcaacgagatcgtgaatccaatcggatgcgcagactgccatgagccgcagagcatgggattgcgcgtgacccgctcattcttgaaaagtgcctataagcgcaacggattacgtatagaggacgcaaccgagcaagagatgcgatctctagtatgcgcccaatgccacgccgaatattatttccaaggagaagatcgtatactagccttaccttgggatcaaggttatacagtagaaaatatagaagcctattacgatagcataaacttcaccgatttcacccataaattaagccgggcacatttgataaaggcgcaacatccggatttcgagttattccagatgggcattcacgggcaaagaggcgtttcctgcagagaatgccatatgcctgctgtcggggaagatgagaaccggtacaacaaccatcatatcaaaagcccgttggcgatgatagaccgtacttgccaagcctgccaccgggaaagtgaggagatcttacgcaaggatgtttatgaacggcaaaacaaagtctacgccatacgcatgcgtgtagaggaagaattgacaaaagcccatatagaagcgaaattcgcttgggacaaaggcgctacggaatctcaaatgaaaaacgtattaaaactgctccggcaggcacaatggcgttgggacttcgccgtggcctcacacggggcggctttccacgcgccccaagaagtcacacgtatcttgggcagcggactcgataagtctacccaagcccgcatccagatcatgaaggtcttagcgcagctaggctatacccaagacgttccgatgccggatatctccacgaaagcgaaagcccagcaatatatcggcctcgatatggaagccgagcaacaggccaaacaaaagtttttagaaaccgtcatcccccaatggcaggaagaagcgagggccaataaacgattcatcgaaggtaattaagttctttcctccagctccaatcccggggtataaggtagcgagatcgtaaacttactacctacaccaacctcggattccagcgatatgcttccatgaaacgtatgaacgatactctggcagatcgctaaccccaagcctgtaccttgagcaaactcatccaatttctggaaacgctcgaataccttttcctttttatcatcaggaatgcccttacccgtatctttcacggaaataaggatcgattttccatctgcgctaagttcgtatccgatctcgatatatcccttagcggtaaacttcaccgcattattaatgaaattgatacaaacctgcgtcaaccggaaatgatccgaacggatgataataggtttatggggaacccttatctttaactccactccctccggcatcatcaattgatgcgtatggaagatatctcccatcagtttactcagatcgaggttctcataagagaaagacatgctaccggattctatgcgtgatagatccaagatatcgttgatcagcttaagcaacaggtcactgtttttggtaatcagatctataaactccgccttttcctccagttccaaaggcatatccgaattgagcaattgggagaagcctacgatcgcattcagaggcgtacgtatctcatggctcatattcgccagaaagactaatttcatccgatcggattcctccgctttccggcgggcggctataaggctattctccgtgtcttttatccgctggatattcaagcataagccacttacctcaacagcttcgtcaccggaaaccgaatctttctcattcttattttgggcatagcgaaattcccaccactcataccccttcttattaaagttacaacgacgttgcgtcactttccgggaaagaaagccactatccagcagattccggtctcgaaggaaattatccagttcttcaggatgtatagcatcctgaaactcctcgattttcatcggtacacagggcatacctaaataatggtagaatctattatcaaactcgaatacccctttgctataccgaaaagcgaaaatgttgccgctatccaacgcaaaagaaagaaaagtcttctccctttttaacttctcctgcgcatccttcttatgtaaagcctcctgtatatatcgctttctttggtaactaaaaagcagaagcaacatcaccaccagaataaagccggcagcccatatataatatttatattgaacgacaaacggcatattcgcaataatagctccttccggcaatttactactatcaatgccccaacgttctaacacaccgtaatcaaaaacataagccttgttactcccttcgatttgcggaaaatcggacgggggcgttcctttcaagatagagacgacccggtttacagccccctctacctcatccttaaagacagtgacatacccgccaactacgccattctgatttccgatcaactcattgatcacggagaaacatggaaaggcgctgagccgccccaacgagattgtcatataatccctcttggttgccagatacgctttattataataattctcgccgaatcccttaatcagggcattcgccgatttcgtactgagtgtgcttatatacatcgtatccggctttatcttaggtatatccgatatcgaaatcccgttctttccggataaacgtacccgatccaaggaatatatattgttcacggcacaaatatcctgaatctgcgcattcatgtccgccagcatcatattatcctgaaaggtatcatccgagactcttatgacgatgcaattaccaacaagccgccgtatcaattctatattcctcttataatccgatttatcataaaagcccgtcatattcggatatttccggatgatcgggatattgggataactaacccccataaacacgaccgggatcgatttagcgaggggatgcctgctacttatcaaagcgtttaaggcttgatcgtcattgaccagaataatatccgggttccatgtcgataacccattcagtttcttgaataatttctgtcgctgttgcttctccgaatattgctcacaatccaaataaaaagaatagacactcgcatgtatccccttcttccgcaattcactcgacatgatttccttcatcttctcataggcgggaaaatgtttttcgtaagattgaatcacgagtatacgcttctcctccgataagtctgtagaggatttacatgatatacaggtaacaaagagaaatatgatagatattattccaaataagcgcttagctggcatatcgttcctttaaggtgttttctatgactttacaaaactaaagatttatttcgtacatttgagcatatttttcacgaaatacaatcaaaacatcaaatacatgaaacaagaaatccaattaaacgaacacaacaagcaagagtatcctcctatgcacacggcggaacatatcttaaaccagacaatggtacggatgttcggatgtcccagatccaagaatgcgcacatagagaggaagaagtctaaatgcgattatctattggcggaggagcctagcgcagaggccatggctgaggtcgagaagaagataaacgaggtgatcgaccggcacctacccgtaaccatcgagttcatgccaaaagaaaaggccggcggtatcgtggatttaagtaaattgcccgatgatgccagcgatacattacgtatcgtacgcataggcgattacgatgcctgcgcatgtatcggatcgcacgtggcgaatacatccgagatcggacatttcaagctattgaattacgactatgccgacgggagattacggctacgtttcaaattggtataaaatttaaagcaagcgcaaacagccaaatgaaatattttgtgtaagtttgcaagcgattaaaagaacattttaatacagacattaaatacaatagttatgcaaacaattgacaatttcaattttgccggcaaaaaggcatttgtaagagttgactttaacgttccattggacgaaaacttcaacatcaccgacgacactcgtatgcgtgccgctcttcctacattaaagaagatcttagcggatggtggtagcgtaattatcggttctcacctaggtcgtccgaaaggcgctactgataagttctccttaaagcacatattgaagcacctttctgagttgttaggcgtagatgttcagtttgcaaacgactgtattggcgaagaagccggcgctaaggctgccgctttgcaaccgggcgaagctttgttgcttgagaaccttcgtttctacgctgaggaagaaggcaaaccaagaggtttggctgaagacgcttccgacgaggagaagaaggctgccaagaaagccgttaaagaaagccagaaagagttcacgaagagattggcctcttacgctgactgctatgtaaacgacgcattcggtaccgctcaccgtgctcacgcttctacggctttgatcgctgactacttcgatacggacaacaagatgttcggttatttgatggagaaagaagtgaaggctgtcgataaggttatgaacgacatccaacgtccgttcaccgctatcatgggtggttctaaggtttcctccaagatcgagatcatcgagaacttgttgaacaaggtagacaacttgatcatcacgggtggtatgacttatactttcacgaaagcgcaaggcggtaagatcggtaagtctatctgcgaggacgataagctggatcttgctcttgatttgatcaagaaagcgaaagaaaaaggcgtaaacttggtattggctgttgacgctaagatcgctgacgatttcagcaacgacgctaagactgatttcgctccggtagatcagattcctgatggttgggaaggtcttgacataggtccgaagaccgaggctatctacgctgacgttatcaagaactctaagacgatcctttggaacggtcctacgggtgtattcgagttcgagaactttacgcacggatctcgcacggttggcgaggctatcgttgaggctacgaagaacggcgctttctctttagtaggtggtggcgactctgttgcttgcgttaacaaattcggtttggctaacggcgtatcttacgtttctacaggtggtggcgctcttcttgaggctatagaaggtaaggttcttccgggtatcgcagctgtaaaaggcgaggcttacaaataatcagataagtaagtgatttaataaaaaatcccccgggacgctcggtattcatcgagatgtcccgggggattttctttgatttagttccgtattaatcttgtttcaagatcaaggcggaagaggcgcttacggtagttttaccctgtacggaacctttaccgtccagataaatccgaccatccttacaaaccggaacccatgttccttccggcagagaaaccgttaccgccttccggttcccgttaaagataaccataatcttcttccaactatccccgttcgcatgctcccctaaggtatacgctacgacaccgggctggttcacttcttggaattgaagggcctccctcactccctcggccgtggcgatacggaaagccgggtgtgacttacgaagggcgatcaaatccttgtaatagttgaaaacatccttgttttttgccttcaaagaccagtcgatctcattgattgaatcgggcgattgatagctgttatgtacgcccttcttatcgtgcagtaactcctctcctgcccgcatgaagggaactccttgcgaggtgaagatgatggtctgggccaacttgccgaatcgcaccaactcatccggggtagcgtctttcggggccgagagcttcaacttatccatcaaacaaagatcatcgtggcaagagacatagttgatcacttgcgtaggcttgttcgcataaggcgctttgcaatataatatttggttatagtcgatttgcggatggcggatagcgcctacgataccgaacttaatagactcctcattgccttccggctttccggaggcgaaaccggcctgtgtagtctcgaacacgcttccttttaaagcatcccgcaggtcatcgctaaatacggccacgtcattcagtttcggggcgtttaccttgatcgcccgttgatcttctggtaacggggaatcgctggcggtccaaccctcgccgtatacgaagatggaaggatctagtttggttaactcggcttttacctcgttcatggtttctacgtcatggattcccatcaagtcgaaacggaaaccatccacatggtattcctcggcccaatatttcacggactccacgatataacggcgtaccatcgcccgctccgaagcggtctcattgccacagccggaggcatccgaatagcttccgtccggtttatgacggtagaagtaaccggggacggtcaagctgaaattcgacccgtcacccacaaaggtatgattgtaaaccacgtccatgatcacacgaataccattccggtgcaatccccgcaccatctccttgaactcacggatacgagcctcgggattgtaaggatcggtggaatagctcccctcgggggcgttatagttcttgggatcatacccccaattgtacacattatcttgcaagcgagtctcgtccaccgagccataatcataagaaggaaggatatggacatgggtaacgcccaactccttcagatgatccacgccggtagccacgccgcccggccctttcgtgccctcctccgccaaggcgagaaacttacctttatgcgtcacgccggagttcgcggcgatcgagaaatcccggtgatgcatctcgtagatgataatatcggagaagcttttcaactcgggagatttatccgcctcccagccctccggatcggtagccgcccaatcgattacggccgcacggtttccattcaccccgacggctttcgcccagataccgggagtctcatccagccatttatcgccgatacggatctggaaggtatagaaggaacctttcagatcctcgctcacggagatacgccacgtacccttgtccgaggatttcatcggcaaccggcggataggctcccctccctcaccggaggcgtaaagattcaagcggacttcttccgccgtcggggcccaaagggtgaacacggatttcgtgggagaatagaacaactccagatcgtctccctcatagaaagggtattcatcaaaggatttgtattctttcggtgagttgcagctaagcaacagcgacaggtatatagataccggaactaagtgtctcgtcatggctgattcagtaatttgttttcaatcacaaagatagaagtttcgaatcggattcgccaacgaaacagaaaagaagaggcgaaaaatctaccgcaaacgttttcgcctctttcgctcattcatgctatattagaacggaacctcgttactgctaccttgactcaagaagtcagctcccgccgatgggatcgggggcatcgggtctccaccgttcatggtcgaggagaattcccttaccgctatatcttcctctacattcataaacttggcgaactcgctcttaaagcgcagccggacatcccccacggcaccgttacgatgcttggcgataatgatctcggcgaggccgatcagggaatttccccgctcgtcttccgtaatcttataatattcgggacggtggatgaaacataccatatcggcatcctgctcgatagctccggactcacgcaagtcggctagctgcggacgcttaccttccacgccttgacgggcttccacaccacggttcaactgcgacaaggcgatgatcgggatattcaattccttggccaatcccttcaacgagcgggagatcgtactcacctcctgctcacggctaccgaagttcataccgctggcgttcatcaactgaaggtagtcgataatgatacatttaatgccatgctcacgcaccagacgacgggctttcgtccgcagctcgaagacggacaagctcggggtatcgtccacgaagatcggggcgtcgtaaagctccttgatcttaaaatccagctgttcccactcgtagctctccaagcgtccgcttttgatcttctcgcccggtatctcgcagacattcacgatcagacggtttaccaactgcacgttgctcatctcgagcgagaacagggcgacaggcgtattgaaattcaccgccatattcttcgccatggaaaggacgaaagccgtcttacccatggccggacgggcggcgataatgataaggtctgaattctgccaaccggaagtcatcttatccaacccctcgaagcccgtacgcaatccgctcagaccttccttctggagggccgccttttgcaacatctccatagcgtccttgatgacggggttgatctgggtgacatccttctttacgttacgttgcgagatctcgaacaacttgccctccgcctcttgcatcaagtcctctacatcgagcgtctcatcaaatgcctttccttggatcatcgccgtgaaagagatcaactccctcgccagatatttctgggcgatgatacgggcgtgatactcgatatgggcgctgctggccaccttgctggtaagttgagagatatagaacggtccgcctacatcttccaattctccccgtttcttcaattgctccgttacggtaagcatatccacgggacgctggctcaacgccaagtctacgatagcggcataaatcttctcatgcgctttctcatagaaacactccggcttcaagatctcgctgacgatcgagtacgcatctttctccagcatcaacgcacccaacacagcctcctccaactcacgggcctgtggctgaagacgccccatatcggggagcatctccacaggctttttccttcctcttcctgtatttcttgttccttctgccatcattctttctatttggggagtcaaaggtaatatcttttacccatttctgaaaaagattctttatatttaggaattaaaacctgtcgaatcatgaaagcgtattttatcggattagttatcatgggaggttgcctattatacggctgccataccaaacaaaagaaaggggaaaacggtagcgactactcagccgactcccaatccatagcacggcaagataccctaccgttaccgactgatacccatgccgcatcttcagtttccacggaaggatggaccgccaagcagatacgggacagcatagaattgttcttcggcaaggaatacgatacccttcccccgcatctccggaagatccgcagaaacatggcctccctctggaacacggacgactccgtcttcctacagcttatcatagtggaagctccgtatgtaaaagcatttaagacgtacgtattcgactcgcccctcatccggatcggcggaggcccttacgaccggtcgcccgaggaatctctttgcgaggacaccacccacttctccatgcgagtaagtccgaatgtctacccaaccaacatcgaacggatcgagatagccatcaccaaccataccgacctagaagggatgggaggtgaatcgtatttcatcgagcattttgatggtaaagcatggaaaggaatcccgcaaccctgcgccttcgtcgatctcggctatccgatctttcctaacgagacaagagacgatttctcggccaccttgctgcctgagctcaaggaaaaccctccgggattgtaccgggtgcgcaagaccgtcatcaccggacagggcgccggcatcgtccattatcctttggccgccacgttctacctatccgataacccggaagattatgaggaatacacacgcttcgccagccggctccacgagcctcgccccatggccgagttcaagggaggaagagaagccatgatccgtttcttcgaacagaacctacgttatcccgaatcttacaaaggtacgggcacgaaggtacgactcttctactccttcacgatcgattccttaggaatgttacagaatcccgtaagcctacccgagaatatactgtatcctcgcgatacggggaaaacctatgatgagttccgcgatgaagccttacgggtactccggttgatgcccgcatgggaacccgccgtaaaccgtatccatggcccggtcagcatagataccgggctcttcttcttcttcaacgaagaggggaaatgcgggattgaataaacggccagtactgcctaagaagtattggagtacttcttaggcagtactcgggtacttccatgaaagtactccagtactattactagaagtatcgcaatactctcagagaagtaagcctatgctaacgtaaactggcaacaatattgctgtcagcatacagcgacataactttacttacgtaaaaaagtattatctttgtacccgtaaaaagtaattttcaaattatggacgacagtatcccgctagaaacagaacagagtatgaactaacgaggcggagggtttcattgatcctctgctcggattaaacacgaaaggaggcaataatgagacaatttctttattgtgaggccggttatgtggagaagaaccaatggcttcctaacagttgggtaaacgtagagtgcccgactcccgaagatcttcaattcttgatggatcgatttaacgtacccgaatcattcttgagcgatatagccgatacggacgagcgtccccgtatcgagtacgaggggaattggttgcttaccatcttacgtatcccgttgcagaaccaagatcatgacatcccgttcaatacggtgccgatcggtatcatcacgaacaatgagatcatcgtaagcgtatgttaccataagacggacttgatccccgatttcatccgctatacccaacggaaggaactccagattaaaaacaagtatgagttgatcctccggctgatccactcatcggccgtatggttccttaaatacctgaaacaaatcaattacgccgtcaccgaggcggaaaaggcgttggagaaaagcatccgcaacgaggatctgctagcgttgatgaagctggagaagagcatggtattcttcaacacctccatccgcgggaatgaggtgatgctggccaagctccagaatattttccaagagccggaatatatcgacaaggatttggtggaggacgtggagatcgagttgaagcaggcccataacacggtaaatatctatagcgatattcttacgggtacgatggacgctttcgcctctatcatctccaacaacgtgaacacgatcatgaaacgtatgacatcactttccattatcttaatggttccgacattaatcgctagcttctacgggatgaacgtcccgatctacatggaggatatgccgcatggtttcgtggttatcatcttgctctcgatcttgctatccgctacggccttttttatattcaggaagatcaaatggttttaggatatcaaaaaataaaccggacgcagatcacccgtgcttgtcggtgtcatctgcgtccggtaaatatcaaattcggtatatctttatcttggcttacttatgcgtatcctctaggatataacgcaaggttccggcatttaccaagtcctcttgcgagatggtgtagccctttagctttttatcgccggcgaaaacgtccttgatgtagatcgcttccggattactatgcttagactcgattaccaattcgcctttaggatagaatttcttgtcgagctggatcgtaaccttatcgaaagtcggggaagtcaatacatagttcacgtcgcccggacaagccggatagaagcccatcatggagaaaatagcccaagcggacatcgtgcctgtatcctcgttacccgggacaccgttcggggcgttatgatagcaatccttcaacaactgacggaccaacttctgagtacgccaagcctctcccttgaaataactaaacaaataaggataagcgatatccggctcgttggcgggatcataattgccgtcatcgaataccttctgcaaatgatcgacaaatttcttatcgcctcccatcaatttggccagtcccttgatatcgtgaggaacataaaacgtataattccatgcgttgccttcatggaaaccgggactaggctcgaagttctcgccttgtttcggatcgaacggagagtagaaagtgccgtccggcaagataggacgcagtgttccaaactccttgctataataatgtttgtaacctaaagaacgatcacggaataacttggcatcctctttcttacccaaggcttgagcgaaattagccaagttccagtcggcgatataatattccagcgcatgagatacggagttatcgtattgctcacgcaaaggaacatagcccttgctgaaataatcgttcgcgtccggacgaagcaggttgaactctcccggggtagtagcgcctttacgcatcgcctcataagcggtttgctcatcaaagtcacgcaagccgcgcatccatgcgtctacgatatacgggatcgagggatcgccctccatcgtaaaggtctcacgtccgtaaagctcccatttcggtaaccaaccgttttcccggtacatatccagcatcgtacggataatatccaattggcgctccggatagagcaaggtcatcagggtacttacgttgcggtacgtatcccacagggagaagaccgtataacggtttccggtggtatggcctactttcaggctctccatcatcgggtactcgccgttcacgtcttgcaggatattcggatggatcagcaaatgatacataccggtatagaatatcgttttctcgtctttcgtacctccttccacttgtaccttggaaagatccttgttccacatcgtgctagccgccgtacggaccttgtcgaaatcgaagccgggctgctccgtattcatgttcaggcgggcgttctcgatgctcacgtacgagatacccatcttcacctcgatagcctcgccctcgtccgtatcgtaatcgaaccatacgccgacatcgtctccgctcatctcacgggtataactggtatataacttatacttgccggagtagatatcccattcggcctctacccccttcatctcacgttgtttcttccaataacccatcttcttcggggccttgtttaccttcatcacgaagtaaaccgggaatacggcctgtggattatagcagaacgtacctaaaagcttactcccctcgatctccgtatcattcacgatacgtaccgtagcaccggtctcgttcgtcaagccctcgcctaggttcaagaggatatggctctcccctttcgggaaggtaaaacggctcaagcccgtacgcatgctggcagtagcctccgccttgatattatacttggtcaaggtattgctataataaccggggtgagccacctcgtccttgtactcactgccgtaagccttatagtccacgttcaactcgcccgtcgtcggcatcaatagcaaacctcccagctccgggcatcccacgccgctcaagctaccgtgggcgaatcccgtaaagaatttattgtctgccgagtaaggagtagaccaccattgactatccttgtcaaaacgattcttctccgaccccatgacgttgaaaggaaccacgctcatcataccctgcggacaaactgcgccgggattcgtcgtaccgtaattgctcgtaccgatgaaggggttcacataatctaccggttgctgtgccgtagcgaacaggctaccacacaacaggaaggtcattagctgtttcttcatttgataaatgtattttagttgataattaattgattcatacttaccagatcacgatctcatccgtgaagatgaaacccttattcgcctcttttgccttgatacggatataacgggctttccaatcgccgttaaacgtatactcctgaaaagacaggtctttatccgtattggatatcgtagtagggataactccctgcgagatatagctctccccgtcttccgatgtcagcaactccacctctcccggttggtacacgcccgggccgatcaattgcataaagcgggacgataccttatggatatccgtcacctcgcccatgtccaccacgcaatccaaatcattcaaataaccctgccaacggccgtccagataagtcaagcctcccctgtagccatccagcaaggcgttcatgccacccgccatataaccgctatacaacttactattataatgtataggcttattgataccctgatgataatccaccttcttctcggtaggcgttccttgaagctgcccgtcacggaagatagcggccttgatatcagcggagtctttcaccacgatcggaccgtcatagacccgggaagaggcagtgggaatagaaccgtctgtcgtgtaacgtatctccgccggatatttctccgcatccaacatgaccttgatctctcgccgcaaggtatctacctccatcgtggtctcgatctcgtccgagagcgtgaacgtatggatacccatccgttgcagaaccgggatattcgcgttcatacgaggcttaaaatcctcccaactacgatcctcttgcggagtccatccaatctcggcgaccgccaaggtacgagggaacatcatatactccagatgcttctcatccttgatatactccgtccatgtattcgcctgtacccctaggatatgcttactttcctcggcagtcaacgaatccataggcaccggattataactgtacgcccgcttgatcggcgtataaccgccgatggcatacggctgtgtcttcggatcggcttgatagaaatcgaaatacatataaccacccggtgtcataaccacgtcgtgtcccatgcgggcggacttgattcccccttcctcgccccgccatgacatgacggtagcctccggagccaagcccccttccagaatctcatcccaaccgatcaatttgcggcctttggaaatcaggaattcctcggcacgatgaatcatatagctctgcaactcatccacgtccttcatcccgttccggcgcatcaaaccttgacatttcgggcaggtcttccaagctcccttcccggcctcgtctcccccgatatggatatattcggaagggaacaactcgatcacctcggacaatacatcctccatgaacgtaaacgatttctcgttgccgatgcagaaatcacccgtcgtataaggtttgccggcacaactcaactccgggtacgccacgaacacctcgtccgaatgccccgggaattcgatttccggtattatattaatatgccgggccgtagcgtaatccacgatctcacggatatcttctttcgtaaaataaccgccatatgcccccggagttccttccggcagatacttgcgatcctttccatcccaccatttctgccaatcagattccgtacggaaagccacgtccgtagtcagtttcggatatttatccatctggatacgccaaccaccagcatccgtcaaatgcatatgaagcgtattcaatttataataagacatgacgttcaataacttcatcacctcctctttcgggaagaaatgacgggagacatccagatgcaagccacgatacgggaaacggggattatcttggatcgatacgcaaggaatccctttcgacgtatacagctggcgcaacgtttgttccccgtaaaacaatccggatttagaggcggctctcaactcaatccccttctcggtcacgtccaacgcatatccttccggattcccgccattaaaagactcatcgaccacgtaacggatcgtacccgattgatcattcccgaatatgagattactatctactttgaaataaccgccagtcacctcgatatgggccggcttagggattaaattcacctgcggaacctccttgggagcacaggaaaaaagtagtgaggaacaagcgagagcaagtccggttactttcatgcaagaccgttttggcaacgtcataatacttattttttagttgtgttattcttggtgcgtaaatatacaacaataatagacaatatcaaaaaagcggaaagactatcgtctccccgcttcagagttattttaagatgtatatcttctaaaattaacgtctaggaattgcttcttttacaaccatctgacgaccttcgtactcagcttggtttaattcctcgatagctttttgagcctcatcaacgttaggcatttcagcgaaagcgaaacccttagaacgtctagtatcacgatcaacaattaactttactgaatcaacaataccatactcttctaatacttgttgcaaatcagattctcttactcgataactcaagtttccaatgtaaatattcatacgaaaaaaattaaaaataaattaataataaaacaagtgatgttagtgaagatcgatttctagaagaatatattatcattactgagaatagaaactcgaagataaagagcaagacaaactatcttttgtttgttgctacaaaggaaagcattctttttggattaccaactataaaacctaatttattttcaaaataattcactttatcttcagaagactacttatatgagctaacgagactatctgcgtgaaccgcataaaaaagaagagaatctaattaaagatcctcttccctatttgaaaaagccgcactgtagatatgaacaaactccgtatgacaggatttgagtgctttgccacctttgtaatccgccgtgctaagcataccccgaagggtgcggcccgccattggcgacaagagctatgtctcggaattaaaataaactgatgagtttcccaatcgaacaagtgcggcttaactcattccctgtttatctttttcttgttacaaagatatgtaatcgtatcgacataaccaaacaaaaacaacaaaaaaagagcctccttttcggggaggctctttattaactatatagcaaaaatcttattttactttagctacgatagccttgaatgcttccggatggttaacggccaagtctgccaaaaccttacggttgatctcgataccggcagcgtgcaaagcacccattaggcgagagtaagacaaaccttccatacgagcggcagcgttgatacgctgaatccacaaagcacggaaattacgtttcttgttacgacggtcgcggaaagcataagtcaaacctttttcccatgtattcttcgctacggtccaaacgttcttacgtgcaccataataaccacgggttagttttaaaatccgttttctttttgctcttgaagcaacatgatttactgatctaggcataattctaatctgttttgaatgttagcgtcatctcgtaggatgaacttgattgctaatgcattcggttaataaaaatcgttataaaactcgcttaatgaataaagattacttcatgcaaagcatctgctttacgttgcttacgtcaacactagctaccaaacccgtgtgagtaagatttctcttttgcttcttagtcttctttgttaagatatgactcttaaaagcgtgttttcttttgatctttcctgatccggtaagggcgaacctctttttggcaccggaattagtcttcatcttaggcattttccaattatattttaattattaaacttaacctcccttctatcagggacggattttattcttctgttttcttatcaccctcacttttaggcttaggtgtcgtaatcactttctttacaactttcggagctgcggccgcagccggggctgaaccagagcccgctttcttcggagtaagcatgataatcatacgttttccctccagaaccggcaactgctctacttttccatagtcctccaaatcgttggcaaaacgaagcagcaagacttctccctgttccttgaaaaggatagaacggcctttaaagaacacgtaggctttgaccttcgaaccttcctccaaaaatcccttagcgtgcttcaatttaaaattgtaatcatgatcatctgtctgaggcccgaaacgaatctccttcacgaccactttcacagatttcgctttttgctctttctgacgctttttttgctgatagaggaatttttggtagtcgattactctacaaacggggggcgcagcatttggtgaaatctcgactagatccatcccctgctcttccgctattttcagcgcttgagcgatcggataaacacccgtctcaatattgtcacctactaaacgaacttcacgaacacgaatacgttcgttgattctatactgttctttcagattgtcattcttcattcaaaaagatttattctcctcgttattagttatttaatcattacttttttgccagcgattcatcatttcctctacctcgccattcaaaagcgctgcaaaggtagcaattttcatcgaacctttatcaccttcgccctgttttcttacagaaacttcaccattttctgcttctttttctccaacaatgagcatataagggattcttttcaattcattgtcacgaattttacgaccgatcttctcatttcggtcatctacgatagcacggatttcctgattacccaactcacgcgcgatttgccaagcgtaatcattaaacttctcgctgatcggcatgatacatacctgctccggagtcaaccacaacgggaactttccggcggtgtgctcgatcaatacggcaacgaaccgttccatggaaccgaacggcgcacggtggaccataaccggacggtgcttctggttgtcggcacccgtatattccaattggaaacgttccggtaagttatagtctacctgaatcgtacctaactgccaacggcggccgatagcgtctttcaccatgaagtcgagtttcggaccgtagaaagcggcctctccatattcgatcttagctttcaagcctttttcctcacaagcctctacaatagcttgctcagccttctcccaattctcgtcgctaccgatatatttctcacggttcaccttgtcacgcaaggagatctgagcctcgaagttctcgaaattcatcgtcttgaatacgatcgagatgatgtccatcacgttcaagaattcctgctttacttgatcggggcggcagaaaatatgagcatcatcctgcgtaaagctacgtacacgggtcaatccgtgcaactctccgctctgctcataccggcaaaccgtaccgaactcagcgagacgcaacggcaggtccttatacgaacgaggagagtttttatagatcatacagtgatgaggacagttcatcggtttcaagaagtattcctcaccctcctcaggtgtatggatcggttggaaagaatcctttccgtatttagcgtagtggccggaggtaatatacaataatttattaccgatcggcggacacattacctcttgataattataacgagcttggatacgacgcaagaactcttgcagacgcaaacgcaaggcggtacctttcggcaaccacatcggtaagcccttacctaccgtatcggagaacatgaacaagtccatttccttaccgatcttacggtggtcacgtttcttggcctcctccaacaatgtcagatactcatccaacatcttctttttcgggaaagtgataccatacaaacgaaccaattgcttgcgtttctcatcgccacgccaataagcgccggctacgctcaatatcttgacagctttcagataagaggtattcggtaagtgcggccctctacacaagtccgtaaaagaaccctgtgtataggtagtgatcgtaccgtcttccaactcactgataagctctgttttatactcttcacctctatcgccgaacatcttcatggcatccgccttggtaatgtcctgacgtttgatctcttctttcttggctaccagctcaagcatcttagcctcgatagcagcgaaatcaccctctttgatcacggcctcgcccggatccacgtcataatagaaaccgttctcgatcgccggaccgataccgaatttaatacccggatataattcctgcaaagcctctgccataaggtgagcgctggaatgccagaacgcatgtttaccttcctcgtcttcccacttcaaaagtttcaccgtagcgtcgtcgttgataggacggcttaagtcccaaacctccccattcacgcttgcggctaggacttcctgtgccaaacgagaactaatgctttccgctatctgcatagcagtcgttccctttgcatattctcttacggaattgtccggaaatgtaatctttatcatattctattctctaaaattctttatattcagcccacaaagttaatatttcttttctatcagcgaaacatttaactcgaataatttgcgttatcaccggcttgtcattcgcttgatgatactataggcgttgtagatacccaattcccctgccttgctcaagtcggcgatgccccggttcacgtcaccttgcgacagacgggctaacccacggttgtagtaagcctcggcaaattcagggtctcgctcgatcgcctcgttgtaatcaacgatagcggcacggaaatcacgctgggcgcaacgcaggttcgcacggttaaagtaggcgtacacaaaacccgggttcagcttgatcaccatatcgtaatccctcatgatctgctcatgctcataggctcgcttattatccttcaacatagcgctacgagggtctaccgaggtgttggcgtttacctgcgactgtgcggacttaccgatattcaagttcatccccgagccactcaagtcgtatgtatccttgtttgcctgctgggattgggtgtacatcaattgcttataacgttctacggcacgattgaaataggccatcgtgaacgaggggtctcgctcgatcgcttccgagaaactcttgatcgcctccgagaaatcctgcaccaacatgaagtccatcgcacgaccgaaataagcgttagcgttgttcggatcacgctcgatctccgccgaatactcgtcgatggaggcgaaatgcacggcgatctggtcctcggtcaaagcggcctcctcgttcgtgatacgcaatttacgcttcaagaccatctggccattgtaatcctccaccatcttgtcgtaataaacaagtttctttacgggatccgccttctcgtaataggtcaagacaaactggggttccagatccacatggacattccggtcttgtacacgcccacggacctcgctttggtatttacttttacgctcctgctccttatcgtataccaccaagcggttgaacttattgatattcttatcggattgctcacgagtattctcctccgaatcgtccgtcttggcatctccgttcaccgctgtattggaacccgaagacgatgtcttcgggatctgtccgttcttggcctgctcctccatctttatggccgcccaataatcacggtctgcccccacgttatcccccagcttacgctttgcttccgaacggctcacaaagcctggcaggaaagtaggatattgcttcaagaccacgtcgtaatcctgcacggccccccggtagtcgcccgtctcgaaacggagcaacgcacggttgtaataagccatatagttatctggctcttgctggataacgacatcgaagtcttcgatagcacggttattatccccgacttggaaccgaagcaaacctcggttgaatcgtgcgatcaagttccggctatccatgctgatcacctgatcgtaatcggccatcgcacctctcaagtcattcatctgataacgaactagcccccggttaatataatatccgctctcacgggtatccagacgtagagcctcgttcaaatcggccaaagcgtccttgtaatcatccatttgataatgaaggatcgcacgattgccatacgccggcgcataataaggatccatctcgatcgccttattataatcggccaaggctttcaacgtatcccctttctccagatacatagcgccccgtgtcatataattcatggaatatttcggatgggcggtcattaaatcatcgaatgtcttctccgccccgttgtagtcttttttctggataaaagccaccgccatattcaccagcatctggcggtcctcgggtttgaactcaagtcctttctggtaatcgtcgatcgcctcgtcgtatttctcctggctttgacgggcgatgccgcgagcgtaatacgcttgcgttaaaaaagggttccgctgaagacataaagtacagtcttcctcggcccccttaaaatcgtccagatttatcttcgccaccgcacggtaaaaatagggttccgccaaccaaggtttggatttgataacctgattgaagtactgaatggaaagaacataatcctcaaaataaagggcgttcctgccaatggccaatacacggtccgtattaatctgcgcaaaaagcgaaatcgtaaatatctgtaatatcaaaaagagtgttgccttcttcatcctattaaaaatgattgagaggcaaaaataagtaaattatcttacttagactctatttttaccattaaatgattcttcgttatcttatcgccctcttttacattgagctcgacaacgactcccgatatgggagcgaccacccggttctgcattttcatcgcctcatggattagcagaagttgcccggcctccacagcctgtccttcctctaccataatcttgataatcgttccgggaagatgagaaaccacgtcaccagccgacggcttatgccacatcggtcggctcttatacttcgctgtcagcaacgtcttatatttacgtgccgtcaccacaaagtctacatattcttcttgctggtgtttcttttccatactctcatcaatttagaacggaggcaaaccgtgcttcttggccggtctgtattcctcttttagaatggaaagcttcagtgcgtgtagcaataatgaacgggtttctttcggttcgatcacagagtcgataaatcccttggaagccgccacgtacgggttcgcgaatttctcgatatattctttcaccttctcctgacgcatagcgttctgatcttccgcctccatgatctccttgcggaatatgatgttagctgcgccttccggacccataacagcgatctctgcgctcggccaagcgaacatgaagtcagcgcccaagtgacgggagttcatagctatataacctccaccgtacgccttgcgcaagataaccgtgatcttaggaacagtagcttccgaatacgcatacagaaccttagccccatgacgaatcacacccgcatgctcttgatctacgcccggcagataacccggcatatcctccaacgtgatgataggaatattgaatgagtcgcagaaacggatgaaacgagcggccttgtcagcgctatcacaatcaagcacgccggccaaaaccatcggttgattggcaacgaaacctaccgtttctcctgccatacgaccaaaaccgatcacaatattagcggcccacaactcttgaatctccaagaagtccgagtcatcgacgatacatctgataacgtctcgcacatcatacggttgtttcgggtccgccggaactacttgctcgatattcagcatagcggacggctctttcggctcaaccactttcgcacgctcctgattattccaagggatgaagctaaccaaacgtttcacctgatcgaaacattcttgctcgctcaaggcataaaaatgagcgttacctgtagtctccgcatgaacacgtgcgccaccaaggtcttccatagagatatcctcacccagcacggtcttgataacgttcggtcccgtgataaacatcttagagatgttctcaaccacaaacacgaagtccgtcaacgccggagaataaacggcaccaccggcacaaggaccgaggatcaaggaaatctgagggatcacgcccgaggcgatcgtattgcgatagaatatttcaccataaccagccaaagcaccaacaccttcttggatacgtgcgccacccgagtcattgattccgatgatcggacatttcatcttcaacgcatgatccatgatcttggtgatcttacgagcatgctgcaaacctaacgaaccaccggcaaccgtaaagtcctgcgcatagatgcaaaccggggcaccaaagatcgtacccgtaccagtaaccacaccatcacccggcagaaccttcttctccataccgaaatcacggccatcgtgtttcacgaacatgtcatactcatggaaagagttcttatccaacaaagccaagatacgctcccgggcagtaagcttacccatcgccacttgcttttcgatagcagcctcaccaccgcccatctcgataacggctttcttttccctgagggcctcaatgtttttacttaaatctgtcatattgattatttatagatttattatttaccaacggcttttgcccggtaagagcaacgaaccgtccctttaataatactatttaatttgcctttgttcaattggcggcgaatagcggagacattgtctataaagacatgccccgtcagatgctcgcactcatgctgcacgatacgggcggcgaaaccttccaccacttcctcgtgctcctcccaattctcatcccaatatctcacacgaaccgttttcgagcgagacactttctcgtgtatacccggcaggctcaagcagccttcctccatagctatttcctcctcgctacgttccaaaaactcgggattaatcaacgcacgcttgaaacccttgcattcagggaagtcatctcccatcacatcaccgtctataaccaccaaacggatagacaagcccacctgaggagcggcaagccctaccccatcagcattatacatcgtttcaaacatattggcaaccaactgtttcaagtcgggataatctttaggtacatcctcagcctcttttcttagtacgggctgaccatataaaaatacgggtaaaatcataagttataactgatattttttactttctaaataagcttgcaaaataataacggcgctaatctcatcaaccaatcctttatcttgccgtttctttttctttaaaccgccttccaacatggccttatgagctaagaccgacgtgaaccgctcgtcgtaataagttaccgggatacttggtatcgtccttttcagatgggtcacgaacgcctccacatacttcatgttctcagaaggctcattgttcatttgcttcggaagcccgaccacaaataaatccaccggttcccgtgatatgtaatccgacaggtatttcacaacctctccacttgggactgtcgccacgccgttagcgatcatttgtaaaatatccgtagcggctatccctgtacgtttccggccgtaatctattgcaattattcttcccatcgagcgcgaatatagcataaatataaatacagattacacaaatccgcaaaaagtgtgcaacaaatcggatcaatatgcattcttctctcccttgaacatattcagtaccgtaaccacaataatctttaaatcaaggaagaacgtccaattctctatataccacacatctctcttcacacgtccttccatctgctccagcgtcttggtctcacctcggtaaccggtgacttgcgcccaccccgttactcccggtttcaccaaatgccgcaccatatacttatcgatcaacgccgagtactgctcggtatgcttcagcatatgcggacgagggcctaccacggacatatcgcccagcaagacgttcacgaactgagggaactcatccaaattcgtccggcgcaagaaatcgccgatccgggtcttccggggatcatccttgacggcctgcaaggtatcggcctgcgcgttcaccttcatcgtacgaaatttaaaacattcgaagtcatgcccatacaatcccgtacgtttctgcttaaacaaaatcgggccgggtgagcttaacttgatcattataccgaccacgatgtacaggatcggataaatcgtgagcaaaatcaccaaagagaaaaatatatcgaacgttcgtttcaagaaccggttataggcggattgcaaaggctcccggcggaccgtcagcaatgggatcgattccatcacctccatcaccatactcttctttacatcccggtaaaactcgggcacgatatagaagcgcaccatcttcttctcagcgaaattcagaagccgtacgatctttccgttgttcgtacccggcaaggtacaataaatctcatcgatatcatgctccagcacatacgcttccacctcactcgtcttacccaaataattaggtaaaacgtctttcaacgagtcattgtcatcaaagaacccctttacactaaacccatagctcaaatcatctttcataacttggtaaagctccataccattctttcccgcacccacaatcaccaccttcttaaagttatagccttttcgcctataaaactttaaggataagcgcacaaaaacccgccaaagcgaaaacaagatgatagaaaccccgtaatagaccaagaggaaggtagccagaatatcccctacattcaagaagatcaagcaagtagcgaataaaaagataagtacggtaaccaatccgaacgcccgttgcacaatcttgtcgataaacacgaccgcctgatgcaattgaatcgggataaaatataaagagaagaaataacagaaattcaataacaaaataacctctctcaaattataggatatcgcttccgtgtatttcgggccaagcagatgaaaaacggccataaacaagagattcaatacgatcaaatctcctacaccaatcagccattggattaaataaccatgttttttgttcaatatcatagcaattcgataaattctcacaaaagtaagtatttttcggcgcaaaaaaaaggccgcacttagaagtacggcctttttaaagtattaattcgtaaattaattattagcgctcataattactacacggttccagctattttcgccataaggttgttcgtccgaacctctccactcgatagtgatctggctagaagagataccgtatttatcgataagttccttagcgaccgctctagcacgtttctcagaaagacccatgttataatcagaagtacccgtcttcttgtcagcgtaaccaactaccttgatcggagcgttgttgttcttcatgaactcagctgtgttatagatattgatctgctggttcttgtcgatcttagcgctgttgatgcgaaagtaaaccacattgtcaacgtagttatttacaacttcagtaactgtctcttggcactcagggcaagaaaccggacgtttgctcaactcatcgttagcagcacgcaaagagttgatctggccgttcaagtcgttcaacaaagcgtaatccatcggctccaatacctcgaagtctgtcttacccaatttgaatgtcaaaccagcgctcaactgaacgataccatctgtcaggtgattcatctcgacacggttaaactgctcgttcaacaaagaaccttggatctcaacgttcaaatcaacacgtttgctcaaacggaaagcggttaagataccagcgttcaacgtaggagactccgttcttggacgatcataagactctgtagtcttgaaacgctgcgcataaccaaaaccgacccaaggaatcaagcggaacactttagattctctgtaaggagcccagaagttagtaacatcccacaacaaatctacgtgagcggctacatatttattatgttgcataaactgtgcgccatcaccttcaaaaccgtggataataccaccatttaactgggtacggaatcctaaatacggattaaaccacttaccaaaagatacttgtggagcgaagtttaaacgattcttgaaatcagcctctccattttggtctcctaacaatacgctggctccacccgcaattgaaataaaccaattgtcgcgagctttattcttcttgaaattagtcttataaccagcctcattgctgaaccccacctgcggttgatattcctgtgctgccacagagaatacaaaacctgataacaaagctaaaagtaaaaccttagtcttcatattttcaacattttaattaaacaatcaattacctaatatcttaaaattggcacaaatttaactctttttgtaattacaacaaataaaatcttcaaattgtttcgaactcactcgaaatagttcaaaattttatagcccccctctttcagataagactccttcttcattagttttatatcgttcttcatcatatcctcaattaaagccgctaatgaatactccggttcccaccctaaacgagtacgtgccttcgtagcgtcaccgatcagcaactctacttccgtagggcggaaatactgcggatctactcccacaacttcctcacccacacgtttcttaaagttttccagataggcatcaccaaccttcttgacgaacaatccctcgtctatcgactctatgatagcgacctcgtctatcccttctcctttaaagcggattcccacgccaatttcctcaaaagccatacggataaagtcccgaatcgtggtagtaatcccggtagctatgacataatccgagggttcatcttgttgcaaaatagcgtacatggcacgcacgtaatcttttgcgtgtccccaatcccgtttggaggaaagattacccatataaacctttttttgcatacccaaaacgatacgtgaaaccgcccgggttaccttacgggtcacgaatgtctctccccttaatggagactcatgattaaacaagatgccattggaagcgtgcatatgataggcttccctgtaattcaccgtaatccagtaaccgtatagtttcgctaccgcataagggcttctcggatagaaaggagtagtctccctctgcggcacctcttgcaccaagccatacaactcggatgtagatgcctggtaaatacgcgtcttcgggatcaagttcagcaaacggaccgcctctaggatacgcaatacgcccaaaccatccgcattcgcagtatattcgggagtgtcgaaacttacttttacatggctcatggcggccagattatagatctcgtccggttgaacctcgccaatgatacgtgtaagattcaaactatccgttaaatcgccataatgcaaaatcaaattacggttttccacatgcggatcttgatacaaatgatcgatacgatccgtattgaacatggaagaacgacgcttgataccatgtaccgtatatcctttcttaatcaagaactcagtaagataagccccatcctgtcccgtaatacccgttattaacgctactttgcccatttttctaattttcaattctcatttttcaattcccaagtaccattcatagagtcgcttcacgcccttctcgatctcgatcgtatggcgccaacccaaggcatgcaacttgcttacatccgtcagcttacgaagcgtaccgtccggcttggacgagttaaacctcaactcgccctcgaacccgatctctcgccggatcagttcggcgacctcacggatcgaaagctcgatacccgtacctatattaatatgtgtattccggacctcgccctccttctggcggacatcctcgaaatccacgtgttccatgatataaacagaagcatcggccatctcctcgctccataaaaactcacgaagcggcttgccggttccccacagctccacctcgcccggacggataccctgtttatccaatacggagagtatctccggctcggaggccttcccagacacgccctctaccggacgagtgtccatatccttacgcaaggcctcccaatctcccatatgcaggcatttcgccagatggatcttacggatcatggctggcaacacatgcgaggtctccagattgaaattatcattcggcccgtagaggttagtaggcatcacggcgatatagttcgtaccgtattgcaggttgtaactctcgcacatcttgatacccgctatcttggcgatcgcataaggctcgttggaatattccaagggagatgtcagcaagcaatcctccggcatcggctgcggagcctcacgaggatagatgcaggtgcttcccaagaataataatttctttacattgtttttccaagaggcatgaatgacattattctggatcatcaaattattgtagataaaatcggcacggtacagactgttcgccatgataccgccgacgtgcgccgccgacaagaacacatagtccggccgctcggctgcaaagaactcgttcacagcggcttgatccgtcagatccagttccgcatgcgtacgaagcaggaagttcgtataccctttgctacgcaaattattcaggatggcggagcctaccaagccccggtgaccggcaacaaatattttactgtctttttccatcgatatctcgtattctgaactacttctacttattaatcaacctcatcaaatactggccgtactgattcttaatcatcggcaaagccacttgctcaagtcgcttctcatcaatccatccttgcttgaaagcgatctcctccagacaagccaccttcagtccctgtctcttctcgatcacctccacgaaagtagatgcctcagacaacgagtcgtgagtcccggtatccaaccaagcgaatccacgtcccaatagctgcactttcaactccccatccttcaagaaccactggttcacggtagtgatctccagctctccacgggcggatggcttgatattcttggccacgcccaccaccttgttcggatagaaatacaaccctaccacggcgtaattcgacttcggttccttcggtttctcctcgatactgaagacgttcccatccgcatcgaactcggccacgccatagcgttccggatcgtttacgtagtaaccgaacacggtcgctttttgttcgttctccgccttgtcaacggcctcttttaacatacgggtaaagctctgtccgtaaaagatattatcgccaagtaccaagcaaacggagtcatcgccgataaaacgctctccaatgatgaaagcttgcgccaatccgtccggtgaaggctgctcggcatattcaaaacgaacgccataatcggagccatcgcccagtaaacgacgaaagcccggcaaatcctgaggggtcgatataataagaatctcccgtatccctgccagcatgagcacggataccggataaaaaatcatcggcttatcataaataggtagaagttgcttggaaactcctttagtgatcggatacaagcgggtacccgatccaccggctaaaactatacctttcatattctttccattttgttcgacaatactcgcttaggatcgattccacaccgtccctaaaactatacaaagttaaacaaataataatagattagcgcatggttttcaaaaaatcgtccatattctgatacaatgggacgccatagcgcgcacaagttaagcgcacattatcatagcggtaaaagccgggctcgcaaatcacccgcaactttccggagcgcataaacagccccatctccaataaagttatcggggatttgctgctcgccagaatgttcatgataatcagatcggctttctccagatgctccagttcccaattcacttgatgctcaaaatcggacatctccccgctcaaccctttatctctacgaggattgaacaagagataccgtccctccggaagcgcccggaaccagtcgcaggtagccttctgccaatccacgcttttccccatatcgatcgtgccggccaaaaagattttttggtatacagcttcatccaaatccttattttcagtatcgggatacaagacaacgacctcagattgggcaaaccctcccatcggcaccaaaaacaaatataatatacacagtacaatatttctcatattcatgtctcaaagcttacttttcaggcaacaaacttcgcaaaaaaacatgaatccaacaaatacattcactttaaatgtgggcaatagtcttgtatatactaataggatatcacgagaagttgtacttacttggacggtgaagtatatctcctagggtacttgcagtatatcttctccaaggagaggagtatatgtacgtgttttttcgaaaacacgtacatgtttttgggaaggactcggcatgtagcaaaatcatgggttcagcccataaatcgtagcctgtacggcatgcgataagatataggccgcaggcgtgtcgtttgagggggaatagcctttggagagcctctggattacgggttccttgttcgtgcccagtatcgggaccaataagggggcgccgttcaagataagcggtcccgtcatggtgatccggtattggccggtagaaggttgctgggataccgcatagttacggctatccgacaatagctccatggtggtagggaaaatggatgccgtatgggaatcctcacctacgccgaggatgatgcaatcgaacgtaggcatttgattgaacaacggcaagaattcctttacgacccatgaataacgcatcgcctcggtacccggctcgttctcgcccttgatccggtggatatggtccgccgggatacgcaaaggcttaaaaagcaaatgattcgcatgaccgtaattactatccggactcgttggtggaacgcaacgctcgtccacccagaagaaacggatgttattccagtcaatcttatccttatactcatctacccagagggaaaacatatgcttcgccgtctcccctcccgagagcgctaggttaaacggagcgaagtctttccggcgaatcatcgccatcatatcctccgtcatcgaccgaagcgcctctttcatctcattatatctctttatttccataaaattatcttctttggcaggcgcagactttcttttccgcacctaaaataacagtttcctccggtccgtcctcgcccggctcatagaagaataagttcttcgaaccctcctctttccaatggagcaagatcggatcgataaatttccagctagcctccaaagcgtcgctacgagcatacagggtggaatcgcccagcatggcatccagcaacagacgctcgtaagcgtcaggaagatagctcttcgagagggaatcgtagcggaagtccatgctgacttgcttcacctcgaaaccggctcccggcattttcagcccgaacttcaaggatatactctcgttcggttggatacggatggtcaatttattgcaggaacctcccgaacattgaccgacaaacagttgatggggcgtagacttgaagtggatcactacctccgatgacttctccggcaacttctttcccgtatagaaatagaagggcacaccgctccagcgccagttatcgatgaagaatttcatcgccacatacgtctcggtattcgagtcgggagctacgttcttctcttcccgataaccgatatattgtccgcggacaaccatcttatccatatccaacaccgtatacggacgtatggagcggaatactttcacgatctcgtcacgaatcggttccggctcgaatatagagggagattccatggcgataaacgacatcaattgcatcaagtgattctggatcatatcccgcatcgccccggctccatcataatatttccctcgattctccacccccaaagtctcggtagcgctgatctcgatggaatcgatataattatgattccacaatggctcgaaaataccgttcgagaagcgcaataccaagatattctgcacggtctctttccccagataatggtcgatacgataaatctcctcctcatggaagatatgtcgtaaatgatcgttcaactggcgggcagactccaagctggtaccgaacggcttctctacgatgatccgcctgaaaccatctggagactcggtcttgttcaaaccgctctccagcaaacattgcgggacgatctcgtacatcaccggcggggtagccaagtaatagatgatcttatccggcaagtcatgtttctcttgcaagaactcgatgcgctcacgcaatttgtagtattcatcggcgttcgtggaatcgaaggcgaggtaatagacattctccaagaagtcatcgatcaagccctcgtcgtaagtctttcccttctgtgcctccaagatatgcgtatgttgctccgcacggaactcctcatcaccataagcggtacgggcggcccccaagatgcagaagcggtcgggcagcaagccccggacatataactcgaacaaagagggaagcaacttgcgactggtaagatcgcccgacgccccgaatataactaataattgattatctgctttcttcatacctttatacgttataagttccagaaaccgtctttcctccctcacccgtccagttggtatggaaaaacttaccacgctcccaatcgacccgctcataggtatgagccccgaaataatcccgctgagcttgaatcaggttagcggcagaatgtggggtagacaatccatcgaaataactcaaccccgagctcattgccggcaaagccactccatgcaaggcaccctcggctaccacttgccgccaagccaacaaggaagactcgatcttttgaataaagaactcatcgaataagaggttctccagattccggttcttctcataagcctgcgtaattttctccaaaaagacagagcgtatgatacatcccttccgccagatcttggcgatcgtaccgtaatccaactgccaatcatatcgcttggaggcttggcacaacaaagagaatccctgtgcgtaggaaaccaacttagcggcatacaaagcctgcttgatctctttctccgagatcaaggtctgccccagcacgccactcttcggataaagcgaggacgcttttttccgttcttcctgcatggaagaaagcatacgggcataaacagcctcggtaatcaacgtcagcggatcattctcgtccatagcggcgatagcgctccatttaccggtgcccttctggccggcggcatccaatatcttatctagcagatagccctctcccgcctcgtccttgaagcggagaatatcggccgtaataccgatcaggtagctatccagctctcccgtgttccaatcctcaaagatacgagccaaggcctcattgtccagatccagacgattcttcaataaggaatacgcctcggaaatcaactgcatatctccatactcgataccattgtgtaccattttcacgaaatggccggctccacccggaccaatccattggcaacaaggcgtcccatcgtccagcttggcggcgatgctttgcaagacatccttcaccaaaggccaagcggcaggcgagccacccggcatcacggaaggtccgtacaaggcaccgatctcccctccggagattccggtacctacgaagtacatcccatgcgcctccatctccttcacccgtcgttccgtatcatggaagtccgagttgccaccatcgataatcacgtcaccgggtgataagtaaggaatcaattgagccatcagctcatccaccggggcacccgcttttaccatcagcatgatcttgcgaggacgctcgatagactcgacaaattcctgtatcgtatgggttcctataaaattctttccttttccacgaccgctcatgaagcggtctaccacgccttcctctcccggcgctgtacgattataaacggatacagtgaaccccttgctttccatgttcaacgcaaggttttctcccatcacggccaagccgattaatccaatatttgatgttttcatatttatgtttttattttattaatccaaatagatcatttaaagcctcactcatcgacggatgggtgaatatcgaatcccggaggaacgtgtaatcttgcccgagacgcatcgccaagctaaccgtatttatgacttcgctggactcggcgcagaataaggtacatcctaggatcttcccggtatccgcatctaccacggctttcagtaagccatccgtctgctcgatggtacgggtacgaggcatggcggcggcgggcaggctggccacctttatatttttctccatcttacgggcttgcgtctcgttcaacccgacatgggccaacggaggatcgatgaatacggaataagccactgcttcccgatcgtccaagctccggaaaccattaccaaacagctcttcccggataatacggtaatcatccaaagacagataggtaaattgtaatccgccatgtacatccccgatcgcccagatattagggatattggtacgcaacttactatccacctcgatagcgccacgattagtcgtccgtattccggcggcttgcagatttaggctttccgtattcggtttacggccggtagccaaaagcaccgcctcggcatccagccgcaaggtatctcccgagatagcgttacggcagatcaccgtagcccgctcggcatcctgctcgatcgtctgcacgaccgtattcaaatgaatggtgatcccttttttctctagcgtggacttcaccgaatcggcgatgtcccggtcctcacgaggaatgaacacctccccagcctccaagatcgttaccttcgatccaaaaccggcgaacatggaagcgaattccagcccgatatatccgcctccgacaataaccagatgccgtggcagtttctccagttccataatggaagtacttgtatatacgtaaggattatcctcgataccgcatatcgtaggaataatcgtcgtggctccggtattgatgaatatcttctcgccttccagcaagaaagagtccgtatccgttttcacgacaatctcataaggggaacgaaaagaagcctctccggtatagaccgttacggtctcccgatcatccagattcttgaaattcttctcacgaagcaaagaggtcagtttctccttggcgaggatagcctgtttaaactcctccgcatgttgctcgaaggtagaaggtctgcgataccctgtcacttgagcgtaatgtacaagcgctttcgtcggtatacagccgatattgatacaagtgcctccgtacatacccgtcgaacgctccaccacagctacattccatccatggttggccaaatccgccgccaaggtttttccacctttcccaaaaccaataataatcgcgtcgtactttttcatctctgatttatcttcttttcgttagacattaaaataacattcgttttaacctaattgttgcgaatttcatatcgcaaaaatagctccagcccctattttacaaaatggctgttcaacctataagtttagccatttttcccgaaacaagaaagtaacgaacaaataccccctattttttgttctttacttatataatatttataccctatgatcacaacacttataatactggccctatcagccgttttctttgttaatggaaaattacgttccgatcttgtcgctctatgcgccctcgtcttattaatcgtattcaacatacttacacccgaagaagcgctttccggcttctccaatcctatcgtcatcatgatggtcgggttatttgtcgtaggaggagctatctttaaaacgggattggccaagatgatcagcagcaagatactccgtctagcgggaaaaagcgaattgaaattattcatattgatcatgatggtcaccgcttttatcggggcgttcgtcagtaatacgggtaccgtggccctcatgcttccgatcgtagtgagcatggcggcaagcgccaatatcagtcccgggaggttcttgatgcccttggctttcgctagtagcatgggcggaatggccacgctgatcggtacgcctccgaacctcgtggtagatgaggtgctatccaacgccggattcacggatctatcgtttttctcgtttacgcctatcggggttatttgtgtgcttatcggcttggtcgtcttgattcccctaagcaaattcttcttggtaaaaaaggaggatggcaaagacacgaagactacaaccgggcactccccaaaagagttagccaagaaataccaattatcggataatctatatcggatacagatcaggcccggttcccggatcggagggaaaaaattgcaagaattaaatattacgcaggcttataatctctccattctggagatatgccggcagtcgtcctctcaaggacgtttccttaaaaccgtagaccagtccttagccggcccacatacggaattacaggagaacgatatcctctatgtgttcggcccgttcgagaaagtaaaccaattcgccaaagaacagaatctggagcttacggatacccacgtatccgaatatgttgaaggggcggaagttgaaaagctgagcgttcgggagatcggtatcgccgaggtcttattaatgcccgactcgaaattgataaataaggtggtaaaggactctggtttcagggataaatattccgtgaatatcttaggcatccaacggaaaggggaatatatactgaatgatataaaagatataaagatgcatgccggcgatatccttctaatacaaggcacatgggacagtatcgctcgcatgagccagaagcaatcgcaatgggtggtattgggccagcccttagaagaggcctctaaagtcactctggattataaagcccctgtcgccgccttgatcatggtcttaatgattgccgccatggtattcgacttcatcccgattcctccggtagcggcggtaatcatagcgggaatattgatggtattaaccggatgtttccgtaacgtggaagaggcttataaaacgattaattgggaaagcgtagtcttgatcgccgccatgttacccatgtcgctagccttagagaagacaggcgcctccaatcttatctcggagaaattggtgagcggactaggcgattacggaccgctcgtcttgatggccggaatttatttcaccacctcgctactgaccatgtttatcagcaacacggccacggcggtactggtagcccctattgcccttcaatccgccatagccatcaacgttagcccttatccgttcctgctggcggtgacggtaggtgccagcatgtgcttcgcctcccccttctctacgccacccaacgcactcgttatgtccgccggaaaatatacatttatggactatgtaaaggtggggttgcctttacaaatcgtgatgggaatcgttatggtatttatattacctttattattcccattctaaacattcgcacacgcattttagttttatatttgcagtttgtaaaacagtacaagaaaatttatggatataccgtttaaaccgattaggttagaagacaaagagatcataacctcatttacatttcccagcgattatcgcaattgtgatttctcattcgcgaacatgtgcagttggcgtttcttatatgacagtgaattcgctatcgtggatggctatttattaatccgtttcatgatcgaggacaagagccgtttcgcctatatgatgcctgtcggggatggagatttagcgggtgccgttcgtttgctggaagaggattccttaaaatatggacatccgctctgtatgctgggtatcacccccgacgccaaggagcaactggaaggcgcacttcccggaagctttttttatatcccagaacgggattatttcgattacatttatttacgggaggatttagcgaccttacggggtaagaaataccaatccaaacgtaatcatatcaataatttcaagaaacaatattcgtacgagtatgtccctatcacgccggatatcgtcccccaatgcctaaaactggaatgtaaatggtataaggcgaacaatggagataatgacgaggaagagcttaatgacgaacgtcgctcccttacctatgccttgcatcattttgacagcctaggcctgatcggtggcgctctccgggtggataacgagattatcgctttctctttcggggcccccatcaaccataatacattcggagtacacgtggaaaaagcggacgtgaattttgacggagcatatacggtgatcaaccaagagttcgcctctcaccttccggaacagtatacttacgtgaaccgggaggaggatctcggcataccggggttgcgccaagcgaagctttcttatcagcctaccatactattagagaagagtgccgcaataaaaaagcaacttacgcaaactaaataaattatggacaagaaacaacaaatcgtaaacttatggcgtacctgcttcggggattccgaggcatttatcagcctttattttgatcgtgtttacaaggacgagaacgcaatgaccatcgagaaagacggtaaaatagtttctgccttgcagatagttcctcatacgatgacttatttgggtaccgagatctcggtaggctatatctctggggcgtgcacgactccggaagaaagagggcaagggcttatgcgacaactcttgcaagagacattcgaggaaatggaacggcgtgagatcgctatctccgccttaatccctgccgatccttggctattcgactattatagggaacagggttataccgaggcattcgattattccgtagagacatatatccgcccgaatacgccggttcaactcccgaagataacggttatccaaccggaggtaccgacaaccgacgaattgttcgcttatttcaaccgcaaattacgtgaacgcccttcctgtatcttgcactcgcaggatgatttcatcacgatacttcgtgatctgcaattagataacggggggatgtacacggccttggacgagaacgagaaggtggttggcatggctttcgcactgcctcttgaggcgggtacagcgccgtccgacaaaaagctttttatcaaggaacttctttacgactcggaagagatcaaggaattactattgcaagagcttaccctgcaaaataacatatcgcaagcgacggtcaatacccctcccacccctccgggtaccttacctatgggtatggcccgcatcatcgacacgaaacgcatgatccacctctggctatccaaacaacacgaaagccctgtctccaaaaaagatttggaacaaatggataaccaaacgctaacacgacagttgatgggttatcaggggaggatggcttatatgagtttgatgctggattaatgccaataaaataaaaagggatgtgcctctgcgacacatccccattataatatgcattatctctttattctgttttatttattaataaatcgtattttattacattttcatctacataatttaaataccaacccggcgtattatcacctttaatccaactcccgaaaccttcataagcatcatcgatacgaatcgtctctttaggataagtagcgaaatcttgtgaaggtatacttaaagcccacatcaaaccagtttcattcgacacatagtctaccgtactattatcactagaagcggctttatccgtacctttataacccgctatatgaacttcatttctacgatcagaatcaaagccattggtaacaataaagagattaaaattattaacgtttatgactccatctattggtgtattaaaattaattgttacctcattctctacgggggtcattgttactttataagtattaatgggtgttctttccgagctacctaatagagaatgggcatctgaaaacagctgaatcacagcattcgtctgtccttgctcagcgtcagaaaccgccgatgcagaaataccatccaattggaaaccaaccccaatttgctttgtagcgccagtggcatatagcgtatagatgattttagcagactccgtcttgtccccgatctttttattatttatctggatacctattaccaaatcattcatatcataatcgccggtagcgggccaattatcctcaaataaataagtataaggtaaagtctcaacttcttcatacgacggatcttgatctccatctccttctcccggattatggttacctgagtttccattacaatcatcgtcatctatttccacaaatccttgtccttcagaaaacgccacactcgattctgacacatagacagggttccatcggtctgtgttcgcagaatgcttttcgcattctacattgattttcttctgataactcaaaaccttatagccactaatatctacattctccaccttaaacagagcataatccgtatcgcttccgcgtatcacacttgcttgaccggtaaacgaagctttcttgccctcccacatagatttagtatccataaataaggttaatccctttgcatcaagatgtttaacatccatataggcggccggagccagattaataactccattagatatcacatcaaatttctctgattcaaatttacaaaagttgtctatggctccatttgtcatagaaacatgtttagcatcaaattcatgcttattcacaatatggtttccatcattttgcatattaagctcctcaacctcgaaatcacctgtattgtaaatcgaggcatttgaatcagatgatatagatttagcataaaaatcaccctcatttacaatagaagtagcatttgttaaatagattgacaactgatttttattatcatcatcaccaaattctcctcctttttggactgcgatcctagaagttccaataacacttattctagaattccctttagccgtttcaactttgcctccatctaaaatataaacagaagttcctgtctcaaattgcaaatcattattaacgatttgccaaattccttctatataaatacgaatatcaccttcactgggtaaaacaatctcaccattaaggatactaccttttggaattaaataggtcttacctttctccaaagtaattttcttctgaccagaaattttcatacaatcagagccataagaataattaacttctgggatatctgtattgtcactccgtaattgagaacttatgctttttgtcttagttccaagcccgcctatattacaaatcatatccccttcaataacatcaaacgcataaacagccgccctcttaaaaggatccgtaacgcgaatatatatgacaggcatcgcatctggaatattaaggcttatgcaataaggcaatttactattcgttttttgccctgaacctgaaatcaatttcgcattctctccaataatcggattaccagtaaaagcttcaaccgtataataaaattcaccattatactcatccttaacattcactgtcaatgtttttgatttaccaatagagaaagaaccatccgcaggaacttcgagctttggcactggatcgggatccggatccggtttcggctcatacacatccgtcgtacaagcaaccatcagcactgcgaataggaacagtgccatgaaatttactttcgtaaaaatacatctcttcatatgcttaatcattaaatatttcccctataacatcattaaaaaaagaagttgtatattttaatcaacttattgagtattatcaacagcaaaggtagattttattataatgcgaagttcttaaacgcacaaatattatcacatcaattaactataattaataatactccaaagaaaaaacctttgataaatagacaatatttatttcatgccatgttaaaaaagaataataaaagactattcaccctactctaaccattcaatcagcttatcagccaaagttactgttcccggcaaaggtggttggtgccgatgtggagaaggcccctagcgattttctcttggcaataacataccatctggcaatttgacaaaatgaaaactaaagtctcggagaatcgattttttcgggcaaaggtacggctcgtttctaaatacgagaagaaaaagcagcatttgtctcgttgacagatgaatacagaaaaacagcctctcgctccagcgaaattaattcatcgtatctcatattttgaggcaagaaaagggtaaaagcagtgttacgatagggttatagcacggtaagaatgcccattcatgagtactcataaccctatgcgtgaccgctcataatgcctaacgcgagtatcggcattgggcaatacgacctatcgcaacaggtttcgccacctatcgtgtacaaaattggcccctttttcaagaaaaagcgtgtttattgccacacctatctcattatcttgtcactttcgcacgaagggtatgtcaacatattcgtataatatgaagcaaatagtcagaataagcttctatttcgcaacagacccatcatacaagccagaggctcccaataggccttaagcactcacataaaacacggaattttcaatccaactgataaatcttcagcttattgtaaagcgtcttccggtcgatgcccaataactgggccgcacgggtcttattgttgccgcactcttggagggccttacggataaggtctcgttcgtgctccacgttctttagctggatgttagtgtgcgacgggaggttctccgtcagttcctccgggagttccttgcgggtgatgtagcggccggtcgccaataaggtggcgtacttgatgacgttcttcatctgccgcaggttgcccggccaagaataggattggaacaattgcatggtatcgttgtcgaaaccgatgatatctttctggagctcgctattcgccagatcgagaaaatgattggcgaacaagagcaaatcctcttttcgctctttcaagtccgggatacggatcgtgaactcattgatacgatggtacaggtcctcacggaaatctcctttctcgatcgcctgccgcaagttctcgttcgtagcggatatcagacgtacgttgatggcgatctcctgattgctcccgatcggcttcaccttgcgctcctgcagggcacgcaatagctggacctgcacctcatacgtcaggttcccgatctcatccaaaaatatcgtaccgccttgggccgccacgaacgccccggtcttgttctcgatcgcccccgtaaaagaacctttcacgtggccgaagaactcggaagccgccaattccttgggaatagcgccgcaatccacggcgacaaacggagccttgctacgattactttgctcgtgaatccgacgggcgatatactccttaccggtaccactagcgccggtcaccaataccgacatatccgtcggagccaccaaacgcacatgctcataaagctggcgggccgcttggctctgcccctcgatataaagatccggggccgaagaaaccgggactctcgccggagccttctcctccacgcgcacaagttccttgatctttcccagcaactcatccgggttcagcggcttggcaatataatccgccgctcccagcttcatcgcctgaaccgccgtttgtatctccgcataactggtcatcatgataaggggtaaggaaggatgagtgcttttcagccatttcaataagtcgatcccgtcactatccggcaggcgtaaatccgatataaccaaatcgaacgcttcctcccccagcctccgtttagcatcggaaacagaggacgaggatcttacgacaaaccctttcttacccagccatgtggtaagcatcaaggaaaaagttatatcatcttcaacgattagaatcgacaacatacccactcagattatttatagtaaccacaaaggtaaataaataaaacgaatcaagaaaacatccacgtagctttacgccatactccctcgaaaggaccttgtttatgatgggctaaccaccagtggcaaaaacctagctggagaatgaaaagaaggattcctacggcgaagctggcggtcgttcccagatcgtcatacagggataaaccgtatccgaaatagataaaagagcctaccatcgattgcgtgaggtaattcgtcaagctcattttcccgtaaggcacaagcccgtgaagcaccttatgcggcgccttccactgccacaaaaagataaaggaggataccaatacgcacatgaacgagaaattacgcaaggaagacacgatcgtactcatcgggcgaagctcttcggtacgctccagcaaaccgggtagggaaagggacagataatagaggggaatgaaacaaactaccccgataacaaaggtccttgtccaaaacgtccgatgcttctccggatcgacaaacaatcccttgcgccccaacaacatgcccagcataaagagagccgatgtctggaagaaacgtccatagctccaagcccagagaaggctatacagctgcccgtcccacagattagacttgaccatttcccaaaagctagcaccttccatatacggatagatccgcatacagtgcaccagccattgttccttggatgccacatattccggatgcatcaaggcatacatgaatttaccccattccatgggctgtagcatcaaaaacacggcgatcgccaataccatcttattactcaacttgcaaaccggtatcaacacaatacccaagatcgaataaagcaccaatatctcccccgggaagaacgaggcgttgaagcaaccgataaagaataggagcatcaaccgccagaagaaacgaagccggaagtccttccctttcctcgcttggttatcaaactggatgaaaaaactaaaaccgaacagcagggcgaaaatagcgtatgccttcccggaaaagaggaagaacaaggtatcccatacccctttatccaaggctttcataaaatcggtagtagcctccggaaaattatacaagttaaaatgctcgatattatgcaataggataatagccataacagcaaatcctcgtaatgcgtcgaccacctcgatacgaggtcgggattgtagcgcgtgttccatgatatgattcagtagattttattatttcgtggcaaaagtaacgaaactaaatagaaaaagcatcctcgaaaggatgcctttttcttttgcagacttaaattgaatactcaggacttaatctttcgccatgaataaattcatgacttttgtttttaacggtttaaatgtagaaacgcccacttgcgatttcattaaatagatagcgaatatcgtgccaaagccagcgaaacgcacgacaatgaatatctaactacttatcctttaacaagtaatagataaattttgtttctataaagtagaattttatttcaaaagcatggggaaaggcattccacggatgggtatttattccacaccggattccacaagattacccgatggcggactccgcatccttcacgatagcaagtgcttgctcgattacctcgcccagcaggtggtaccagccggaatcggtcagttcctcatcgttcttctccaagatccgcaggtgttgtaccaatgaattggcccccagcatcgtgaacaggggaatcaacttatgagatatccgggaggcttcctcccggtcttttccctctaacgcatcccgaagtaagtcgatgctcttgcgggtttcctccgagaaggttttcagtatagaggctgaggcctccggatcctctccggcaaaagcggtcaacgaagagaaattcaactcgctccttgcctccagatggagtgtcagcaactcattcagcaaggagattaattgggcggcggtaaacggcttgttcaagaaacccgtgaaaccagcctccagataatgctcgtgctccttggcgatactggcagatagggcgatcaccgggatctcatccgttccggggataccggacgtacgtatccgctccagtaaatgatagccatccagcgtcggcatctgtatatcggtgataatggcgttgaatacggtgttccgcaatagctcgaggacgttatgcggattcgtacaacctaccacctgcacgtgactctgcttcaagagttcctccgtcaaggccagttgtagaggatcgtcatctaccagaagacaatagacatcttgcccctcaaacaagggtaaagcctcggcctcaccagcatccggagcctccgccgttacgtccggcaaagattgattatcggccaagggaagaggtagcaagatcgtgaaatcactgcctttccccggggtactatccaaagcaagcgtaccgttcatcaaggacagaagcttacgggtgatggagaggcccagaccgaaaccttccacctcttccgtatcggcaaggcgagtaaactccccgaatatccgctcttgttcctctttcgggatgcccggaccggaatcgctgacggtaatggacagttgataatggacagcggacagtttctgtaaggagacaagtaaaacgactcgccccgcttccgtgaacttgatagcgttagataagaggtttcctacgacctgccggatacggatcgggtcgcccatataaacttgcccagtctcctccggtttcaggttcaagacaaaccgtaagcctttcgcctccgctatcggctggaagctggtatagatctcatcgaacaaggccgggacacggaagggaacgctatgcacctccatctcgccggactccaaccgctggaaatccaacaggtcgttcaccaaggaaaggatatgatccgaggaacctttcatgttctccagataatattgctgacgctcgtctggatggcggcgtagcaaaagctcgatatatccgatgatggaagagagcggagcccgtatatcgtggctgatcgtcaacatcagcttctcacggcttcgcaataagctctcggcgacctgtttcgccttttccagttgcatacggtaatatttacttcgtgagatatcccgtgagataaagaagaggaacagaaaggcgattaccacggagacgatcgcgattccggcgatcaaatgggaggtctcccttaatagtacctgcttcttatagaccctttccagcgacgcctccatctcctcctcctcgatattacggagcatctggttgatctcccgggtaatcacgctattgttataccgtaagttagaggccctttccaacaactgatccatcagttgttgccgttgccaagccacactgtcttggatgcttttcagcacgctgacaatcgtatcggtcggattataagcgttcaccaacgtatcggtaacgatctcccgggtcgtgttcaccacgatgctggtatcttccttgccgggagagaacacgtcggccaaacgcttgaagaatcctcgcttcttacggggaactaccaccgtatcttgcttgacctctacccgctcttgtacctgcacctcatttacgatcgtatcccggacggcaattattttctcgatattctccgtataaagacgctccgtgttcgcttcctgccaagtctcaagcaagcggcgggtattccatcgcttacgctccagcagtatgtcgatcgtatctattttcaggagttgcatggagtccgtcaccaaggtcctcaacgaatccatgttattatgggccttattcaacgtacgattgaagtggcggaactcgttctggggcatgcctaccaactgccccaacgcctcgctttcatagagcagggagagcgtattggtgaccaagtacaccttccggcgtgcctgatgatccggctcgtcctcctcggccactttctctactatattataaatgtaagcgactgagcagaccgcaatggtaatcagcaaaatatagcctaatatcaccttgctagtaatatgtccgctttgctctttcatatacgattgagatcagtctaattcctatcataagcgatatcccatttatccatcatctcaaaatcctgcttttttaagccgactttccaaaatgggatcgggtcgtcatggtctcccagatacatacggtcacgtaccttgaaggcacgattcgttaaagcaaacgtggaatcggccaccggagtccgcacaccggctatatcaagcatcgtatggaatacgctgttcgtgctaaccggataagtctcgtgtgcctgcgcttccagatatttctggggatatgactcccggtaagccttcgagaaccagatcacatacgggatatgcaactggtaataggtcggtatcggagaagcatgcagataacgggctctggaatcatcgaagatatcctctccatgatcgcttaagtaaagcatggatgccggagcatttgtcttcgccaacatatccacgatttcccccagcacgtaatctgtatagtggatggaattatcataagcgttccgtaactcctttttatacgaggcacgaattccctccgccttatccggcctatagaaacggaactccttcggataacgttcatggtaattaaaatgcgagccataagtatgcagtactacgaaaagattaccgtcctctttatccagttccttctttagataaggcaggatcgccgcatcgtgcaaggaggttagcgtagaacccgtattaaatgcgctcatatcgataaaggtatctgcctcccggtaaaaagcgccgatcatcgaggtcgttagtttctggttggcgatcacgagcgtacggaaaccagcctctttgaaagcggtcacgatacttttctcgtcgtaaaggactccataattctcggcgctggcagcggacaggataatggggacacttttatgcgtattattcgattgcgtcaccacatccgtgaaatgcaccaatccgtctaaagcctccatacggggagtcgtcttgcgctcgtatccgtaaaggctccattccatagcacgggaggtctctcccactaccaagacgtagatctcccgttttccctcagcttgttccagcttagtggcgtcgaacttaaagtcggcggaagtaatatgatacttacggttcctctccgccttatttatggcgaaatataaattgtatagggcgttagccggatacacatcgtccttccatgaaaaccggtgatcttgcaaaggagacaggaagcaaaggatcaagcccatgacaaacatgcctaggctgatcttggcccatttcttccggaaaggatttcgcaatttctctttctgccgtatcgaacgataagcgagtattagagtaggcaatgtatagaaaaagaatacgcaaccgatcaccaaaatgatattccccaataattcgctagcctcggaagcgttcgagctggtaaggttcaaatacatatcaaccgctatcacggactgcccgaaaagatacagaagcaccaactgccccccatctaatataaccttcggcaacaggcaccaaaccacgatccccggtttacgggccactaacaaaacacccatccaaaaggccaaaggtatcagcaacgaggcgataccgaccgtgacgggaagcggttccgtaaaaaagaacacacagtttgggatgataaataacagggcaaataagaaatataaatgctcctgtgaagatatccagcgtattaactttgtaaaatacttcattcaataaaactttgccaactctcaatcattactcttctcaactaatacccagaacctaaaattccggtaattggcaaagataggcgttattaaacacatacaaagcgtattatacacaaaaaatgttattcacagtcattacttctccttcatccgtcgccaatactccttgacagagtttttcacttccctatgtaacagcaagataccaattaagttcgggagagtcatcaaagccacggtgataccggataatgtcaatactaccacacaataaaattatatttatctcctatattttctggaggatagcgataaactcatcattcgtaatgtctagctccggctctttgtaattgacataatcctcaaaatagtcgctggcgatatcggctacgatctcccctccgtccaagccatacgaggaaactagtttctccacccggttacgtatctggcgaatcacctgtaaacgatcctcataacgatctggcttctcctgatcagtgacgtgctcattccgggcgatcaagtaaactaccgtataaaatttctccatgctcccgaaaacagggacaaacaaggatttcttctcctcgggcagatctgccaaaaactgttgtatctttgtcatagctcttactcttttacctaataaaaaaaacaatatactttttgttctaaaacaatatactttcgtgtgtaaaagtatattgtttcgacaacaaaagtatattgttcttctcgagtctgttaaatgattgaattcttcttcgtaaaatccaaaatctcatcaatatagccaaaagccaatcctgttaccgtatctgcgcagccgtaatagatagcgatacgtttcgtctccggatcatgcaaggcggcacagggaaagactacgttcggaacgtctcccatgcactcgtaatccttttgcggggataacaaataaggtccggagcggaatttcactttccaaggttgctccaaatccaagatagcggaaccgaagctatacacatacccgttgcaagaacgaagcacgccgtggtaaatcaataaccagccttcggaagtctcgatagggatagggcccgcaccgatcttcgtacactgccaagcgctatcctcgaacgcagccggagacatcacgtggcgatgtttaccccagaaacacatatccggagactcgctatagaaaatatcgccgaacggagtatgaccgttgtcgctcggacggctcaacatggcgaagtttccgttaatcttacgagggaacatcacgccattacggttgaaaggcagataagcgttctccagctgatggaaggtctcgaaatcgaacgtgtaagccacgccgatcgtcgggccatgataaccgttacaccaagtcacatagtaacgatcctcgataaaacatacacgggggtcgtaggcataaacaaactcgccgatctccttgtcgtcgcactcaaactcgagttttgtctcagagatactccaatgaatggcatctgcgctaaaacctacgtgcaaacgcatccggcgattcgtatcgtcgcatcggaacacaccggcataaccacctttgaaagggacaacagcactgttgaacacactgttcgatgtcgggaggatatcacgaggaatcaccgggttcttcgaatatctccacaatacttctttgctaccctcgggacgatcttcccaaggcatatctggcagcggagcgcctacgattttcaaattatccataactaatcctattaaaatattactatactaacttattacctttatcgtcatacgtgaacggtacgaaataggctaccaagaatgaagggatcatcgccagcaaggtcacgataaagaaatacttataacctagccagtcactcacaaaaccgctcatcattcccggaagcattacgccaaggttcatgatacctgaggcgaacgcataatgcgccatctgatgcttgcccggagctacctgttgcatcataaacagcatcaagcccacgaaaccgaatccatagccaaaatactcgaatacgatggcggaagcgataatgagaccattatcaggctggaaacacgccaagaacgtgtataccaaaaacggtatgttgaagcaacaacaaagcgtaaacaatacctttcgcaatcccttagccgagatataatatccaccgagcaaagaacccagcacaaacgccgccgctccaaacgtaccataatacaaaccgatctcttgctccgttagtcctaatccttgatcagctatcggagctttcaagaacaaaggtacgatctttatcacgaaaccctcggcaaaacgatacaatataatgaaacagatataccacacgatatacttcttcgtgaagaactccttgaagaccagccatagctcagccatactttccttcaacgaatgttctccggtagcggcttttccacccgaaggcaacatcttcatatgataaaaaccaagcaggatcatgatcgtaccgcaaagcagcataacgatcatccaagcgtatatcatggcctctttctccaatcctatcccggtaaaatattgcatcatataacccgccagataaaccagaccacccgtggctacgatcttcgctaaattgtaaaacgcaccttgccaaccgatatatttggcttgattctccggtgagagctctttcatataaacgccatccgttgccacgtcatgcgtagccccgctaagcgctataatacctaataatgcgatagatagagcaaagaaactcggcaagtttaacgccaaggccactaaaccgaataagcaaccggataacaactgggtcaatacgacaaagaatttcttggtacgatacatttccaaaaacgggctccataaaggctttaaggtccaaggtaacatgataaccgaggtccataacgcaatctgggcatccgagatatccaatcccttaaacatgagtacggtaaccatgttcagcactacaaaaggcaatcccatagcaaaatagacactagggacccaagttacagggtttcgacgtttagtagcattcgtgtttttctcttccatgctttatttagaatttaggtgtacaaatataattaataatccggatatatctttaatcgatcggacaaatagaggagatcatcccgaaggtagcgttatcattcaaatcccagaccatctttccggctccgtttatctcgatcaactgcgggtaatgtcctttcgcagcctctccgtcatggccttgccagttacagatatacaaaccaccgtcccgtttagggagcaactgggcaacaaagaaaagctgggctccctcgatatcgttctcattcaccttgcgaacgatatctccagtctcgaaattcagctctatgaagcaatgggcatcaccgcaagcgaccagataattaccgttatccaacgcagccacgctaaacgggttaccgtctactttcacgcttttcagcaattgaccggacggggatatttcccggatctcggaggtagcgaacaagggcactaaataattgccctgcttatttttgtttacttgacggaattgggcatggggttgctcaatatgggtgtcgaaatccgttttcgacaggatctctccttttgcattcacctccatgatcgtcgccgggtatccacaccacgctaataaataattaccgttgggaagtacacgggccgtctgcatctcacagccttccggagcggagatattccagacctcctcatgatcccgggtgattagcttcgcccctttcgaataggaaaaaaggatattccggtcgggagtaacagctacggaattacattcccatcctttttccaagggatgctcccattcaatttctttcgtgttcttgtttacgatggcgattttgtcccagccggaaccgcctaataaaagataatgcgacgcctcatgacatgcggaacatacgagtagcaggcatgcggataatataaaagtatagattttcatggtttaaattatataaataagcaggagcaggtaaaacctacccctgcgatggattatttcgctaagtcgcagaacaactcatatccctgatcaggcgtgataccttgatgcacgaccgcatgaaccgcttggatcatggcgacaggagaagtactctggaatacgttacgtcccatatccacgccagccgcaccgtcgttgatcgcattataacataattccaacgcctccttctccggtaatttcttaccaccggcaattaccacgggaaccggacaagcagcggctaccttctcgaagccctcacaatagtaggtcttcacgatattagcgccattctccgcacagatacgggaagccagaccgaaataacgagcgtctcgagccatttgcttaccaacggcggtaacacccattaccgggatattgtaacggctggccttatcgaccgccttatataagttagccacagtcttagcctcatgcgcctcatcaccgatagccaacataaccgccatggcggagacgttcatacggatagcgtcctctatatcgatcaatacattatcgttcaaatccgtaagaatagacgttccagcgtccgaacgaagacaaatcggtttcgtcgtattcgcagggatcgtagattgcaggataccacgggtacacatcaagcaatccgcatattcaatcaaaggaacgatattcaagtcgatacgctccaaaccggaagtcggccccatgatgaaaccatggtcaaaagcaagcataaccgccttgcctgtcttcgggttgaagatacgggacagacggtctttcatgccccaaggtaagttctcggctcccttcacatggaaactctggttctcacaattgatgcctaaaccgaagtccgcaccttctcttaaatcatctaaatctgccatatttattattcgttatattattatattttgtagagacggggcatgccccgtctcacgctgtgtattattttatagcacctctgcaaaagaagcgaacatacagctccacgaagtagccccgctatcagcgaaaccaatcgaacgctcaccatagttacgggcacgtccaaagttagctttcatcggtaccgtagcctccgctccatcaagcgccgctttagcgccggcattcaagacctccttgatatcatccgacgtacaagcctgcatagcctccaccgccgggatcaaggcatccatcatcgtcttgtcgcctcgtttcgcttgggtttgttgttgcacattcgccaagccaccggcgaacatagctttcacgcctgcggcatccaactcggttccctctgcatgatcgctcatacccaagaagaaagcaccgagcaaggtacttgtcgatccactcacttccatcatcacatccatacccatatcaccaagcatttgcttgaactccgttccagactgagcgcttttattcacagcagtcatagcggcaacgatagcggtaccatgatcaccatccccgattacggcatccaatttagagaattcctcctcacgtgccttgatctgtttcagcgcattgtctaacatggccttgaaggcctcgatagtaagttgtttcatgtatattatttatttacctagggttgtccaataaggtgcgtccgcacgtttgttattcaaataatcgatatgatcctcatccaagatcgccataatcatctggaatccggcttgctcctgtacggtcaagatctcttggatacggcttgccaccacctgcaagccgcgagcctccaactccttataagccttgcggaagatgatattcaattccatatgggtagtagcgcctacgccgttaatgatcagcaacatcttatcgccggcttttggctgtaactgctggcaaagcaggtctaccatctccgcagccgtatcatcggcggataccaacggtttctgtccaccgccaccttcgccatgttggcccataccgatctccatgataccatcgggaaggttcgtgatcgtacctccgttctggggatgcgtacaagaccgcatagcgacagccaaggtagccacgttcttattatagcgttcaccaatctcaatcagctcgtctaaagacttcccttcctcagcggcggcacctaatatcttatacaaaggaacacaaccagccaagccacgacgatcgtctatattcgccccgatacctgcgctgatatcatcatgcgtaagtaatttcttcaccttgatccctttacgtgcagccaactggcaagccatattagcactcatcacgtcgccggaatggttcaatacgaccaacaagatcccggcctcacgatccatcaattgcagtgcctgaaacaaacgttgggcacccggagcggcgaatacgtcacccacgacggagcaatccaacatgccctctcctacgaaaccactcaaggcaggctcatgaccggaaccgcctaaggtaacgatcgcaaccttatcattgcctttcgggttagcacgtacgacgatattctcagctgccaactttacctgattcggatacgctaatacatagccttccaataactctgccgtaatattctcaggatcatttatgaattttgtcttgatgtctgacatggtattatcctcctttagatttataaattttgatttacgaattattttagttccatgatctcgatagcgataccttcttcctcgatgaaagcgatcgtcaagtgctcgtcgcaaacagctgggccgaagattaccttcttaccttccaactctttttccaaacaaggaaccgtataagcgatatggccattggtctgtaccaactccggtaggcagctgcctttctcgaatttcaagaactcgatccggttcggactcttgctgtaatccgtcaaccatacactcaggccttcgttataaaccgccccttctttactttccgtagtgacaattcctacgtgattaaatgttctcatgatctattcaatttatagttagacaattatattattaaaattcgttctcttccgataggatataaagccagcccccaatactaggatgatcgacagataaagataaataaatatcccgttcacgttgtcattctggccataagagtgcatgccactcaagaaataattcacgccgaagaaggtcatcaacaccgaatagaaggccaagatagacgtaaaattaaacaaccacaggttattgcatttcggtatcaagcggagatgcgtcacgatcgcatatatcaccatcgtaatcaacgcccacgtctccttcgggtcccagccccaataacgtccccacgactcattcgcccagaccgctcccaagaaagtaccgatcgtcatcagggccaatccgatccaaagtgacatctcgttcacgatactcaattctcgtacccgttctttgagcatcacgctgttcttctccccgcttacgctcatcatcaccagattcgtcaagccgatcagacaactaataccgaagaaaccataagctcccacgataaccgccacatggaacatcaaccatggggatttcaagaccggaaccagcggattgatctgcgggtccatccaactcaagccggacacgaacaagatgatccccccgaataaagtagccaacgcaaacgtaagcgtactcttgcgtacgaacaacaacccggcgaacaccgtagcccaagccacataaaccatcgtctcgtacgaattgctccaaggggcgtaacctgcgatataccaccgcattcccatcccatacatatggaaaacgaatacggccaaaatgcccagactcaataaccaagtcgtataggtaacccattttttcttcttgaataagaccacgaaagcgaagatcagcaacaagcctcccaaaatcaagtaccctttcttacattgccggaatacatccatttgattatatttaatctcggcctgtattttctcagggcgaatgtctaccgtcttattcttggcttgctgatacgtatggatcattccgattacctcgtccgctttctcccaatcaccactcttcaatccttcctgtacctccgataaataccagcccataatgtgggtaacgaacatggagtcctttccggaaaacgccgacaaatcatcgcccggcgcataccatttgtgatccggatcgtcctctttcgggaaaaggttcaacatctggtaattgatcaattgatggaagatattcacctgctcgtccagcttgatcaagtctttatcgaagcgggtacgctccgccggcattttattgtaggcctcttccagcttctcttgcaatttatagcgtccgtggctatcgaatacctctatataggcacactccttatccgtaaggtcgtaataattggccagctcactattagacaaggcgataaacggcacccggacccacatatccggcatagccaagacactcaacaagaactgatccgagttcaaggaaccgaactgatccgatttatgcaactttcgcagtacctcggaagagaatgtattgatcggcaacatacgtccgcttaccgattggatcggcaacgcaccgaacttagcggcatgttccggacttatcgcatatttctgtataacctccttcatctcgggagcggccgcaccttgcgcccgcaagccccctacggaaagaagaaccgctactaacagggtcgttttacgagcgccccctcttaaatctttcaactgacggcttaatttcatgaaacgggagttcttgcctaccaagcaaagtataaagccgatcactaaaatcacgtagccggtatacgtaatattccttccggccacatctcggttcacggaaagtaccgttccttgctcatccggatcataggaggcttggaagaagcgatagcctttcacgtctaatacattattcatatatacccgggtatggcgagtctgtccatctacatgtaccagcaactcactctcataagcagagggactggcagagccgggatagcgggttaaggtaaatttcacgagttctacgctaaaaggaagcgtatgatagagagtctggtccgaggtacggatcatgatacgatcgctagcctctccctcacgcaggtgaaggattccttcctcgccgaaaaggtgggaaataagtgcacccagaaggatgacaataaaggcggcatgggtgaccatcaatccccatttacgccgcttaagtaactggtgcttgataacgatagccacgaaattggctaccaataagaattggagtaagaaaaatacaggagaatagtaaatcagcgctttagcgacggcagtaccatgatacttctctataaaagtagcgatagccaagccaaaggcgtagatcaatagaaggacgatagtcgtcacggaagaagagataaatctttctagagttttcatttgctcatttattaataacactgatgcgacaaatgtacgcagattaatcatttttgaaagaatcggcgattaatttgccgcatccatgttatctatctataaatagaccttgtctattaatcctcaataattacccggaagcctacgttgaacacacgttggtacggataatatcctttacgggtataagccgtcgagaatttcggtcgctcgatataagaaccgccacgaaccaccttatactcggagacctctttcgatttctcgttgtaaggataaggcaagtaatcagaacgagtccattccgccacgttaccgtgcatgcaatacaaaccgaacggattcgcttcatattgcttaccacccacctgaaccaaattgccatcatccacgccttcctctttcggtaagtaagtatagtatttgtaccaataagaagtcttaggcatcggttgcgggtcgataccgcttacggcaagcaggagcgtggttacgtcggctaggttatcctttttgccgaagtccgcattcatatcgccataccagaaatcttgatcgctaccggcacgacaagcccattcccattgcgcctcggtcggaagcgtgatgttcaagcctgttttctcactcagcttcttacaataatccatagcgtcattgtaacttacacggattaccggttgctccggtttattagcgggatatccttgaaccacgtgatctttccattgctgatccacgaaacggctgtcgtgatccgggaaaatcacgttgaattgctggttcgtaacctccaactcacccatccagaaagctttgtcaatcttcactttcgccgtcggacgagtatcggattgcccacgatagctgcccatcacgaattgtccggccggaatgcgaacaaatgtcatcttgatacccggagccaactcgatctccttacgggtttccttctcgtcagccaacatagccttgatccggtccgcatcgaaaggccagcctttcaccttcaactctttttccttgacaggagccaatttctccggcatctccggtttgatctcacctttacccttcaagtaagcggcataatcggagatctctttcttccaatccacgcctgcgccattcgcatacttatccgtcaactctttacgacgcttgatctggtcgaagccttgatacgggatgatatccttcgaaagcacattcgcattgaaataacccttatccggagcgttgtaatcaatccagttataaagggttttccactctttatccgtcagttgcacgttaaagtgccctttcttcaacatacgaaccagttcactcgtgttcggatgatattcatacggttgaagaaccaccatatcaccctcgccaccttgacggtgtacatacggatgcagattcaagtaagaagtgccataacctaatttatccttcttgcccccacgcaagtcgaaagccttaccctcaccattatggcaagcgatacaggcacgatccaagatcggttggatctccagatcgaacgtgaacgaacgggtccccccttccggcggagtcaacgcatgcggggctttctgcgaagccatcacacgtttcggaataggaatctggttctggtcctcatggcaaccgatacaagataccacctcgcccggctgaccgatcaaccagctacgcatccactggatagccacaccgtctttgtctaacggctggatagaaatcggcgtattcgccgggatcttgaagatagcggagccatcctcttctaccggtaccgtacccaacatacgcttgatgtcccaaccggactggattccatgccagttatgatcggaggtagtcttcacgtaagcatactcataagcgtgcagacgaagagacttaaccgtaccccggggaatgcctctcaaaccctctccctcgtaaatatcctgaataaagaccgtagcctctttgtcattcaatttcacacggtccggaatagccggaggagtctgtgtcttacgtacggcaaccggactgatatagccctcaccctctaccttacgcaaacaagtcacgttatcgaagacgtccaccaaatagataccccataaatcctgcgggtctaatttagcggccaccaagaaatatttatcattcagtggagtcggtttgataaactgcggccatacgccattcaccagctcatccttaatctcctccacgatcggccggttacgatacgggatctcctgtaccataccggcggcgcctttacgggcttttgccggatcgaacacgatcaaacggccggaacgggcgataccatggtgaccggagataattcccacgaaagcggaaccgtggcccggcaacggctggatatcaaacgtactgttcgggaacatcgatccgctaccatacagcgctttctgctccgtaccatccggattcatgttcatcacgatacgggaataatagtgcgtcaagtccgtgtactcccaacgggtatacatcacacgaccgttattcatcactaccgggttccagttcgcgtcttgatcgaaagtcagacggcgcaagttcttcgtatccggcgtataaagtaccatattaccgacagggtcatcaccgcttacacaaggcacgccttgataaccgatattcgagttggcgatgatacgtccgtccggtaagtaggttccatcataaaactccagatccggttcctcgttatgtattaattgcttaaagcccgagccatccaatttcacctcgaatacgttccaacgcttatcgggcatcgtctgggtaaacatagcacgatcgccatcccaatgcatccgcaagtcagcgatagaggaaccgttttccggtttataaatcgaccgtacctgtacatcctccccacgtagattactcaactccacaatatcggcgtcgaatcccatacggcgggcggactcttggttgctccagttattaccctgcgtacccaaatccggagccattgccttatgagcgtttacacctaatttaaagcgggcagccaagactttatcaccatccaagaacgggttcgccagcaagatcgtacgtttattcgcaatcgctttctccgcgttaaccaaagcggcctcatcaccactataaatgccatcgaaacctttctttacctgctgttccagctcatccaaaaccggttgatacttagtggcatcgaaacctttcagttttttcatatcattgaaagccagacgaatcgcctccatattcaaccaactcaagtcgctctgcaaattacagatacgttgagttttctcataaagtttcaaatactcacggatctgagtatcaatatctttttctgtctcgatctgcttaacagcgttctttacatacgcagcgtctttcagacgagaagccagattcaagacaatatcacgctcagcggaagcgtcactagtagtcaaccaattctccaacccatcgatattagcgtttaaggctcctaattccttcggataagcggctagcaagcgtgcggcctcctccttcgggaaaacattcatgatacggaagaatacactacctaccgttgactgatcggccaaacccacctcagcctcaaagcgtacatattccttattgatattgtacaccatcacgccattggcatggcataatacgctatggtcgtatttcttaccaccgatcaacaatggattcccgtataaatccgtattcttgcggatactgttcgaaccggaaacccaataatccgggtctaactcatccaaccaaaccgaactaccgtccgccttgattaaacgggcattcgcccatgtaccccaatcccaatccgtaccgtccggtccggcggccgtaacaagtaccaactgatcctgacccgtcaaatcggcggacatcgggacagccttctgcttcgctttgatccaagcggacatgatcggcatgttcgccttcaccaaagaggcacgaagctcagacttttgttttactgaggcgtcaatccagttatccaccttcttttgcttcggacctgccgaaacaagaagagaggtcgacaacaagagtgataccattatatagtatttattcatgtattaaatttaaatttagaaggttgtttattgaaaccctaaggatcacgatcggcaacccttagaattacgaagcataaccctagaggtttttataaagcggccttctggttcgtgaaacgtaagccagcgttgtcgtgatagcatgcccactcatctacgatagcgccttccggacctgccatcataaagtggaatgtctccaatttcttcagacgtaatacgtcgccgaccttctgaaccacgaaattcttgctcttgatcggtccgtgtccagcagggatagccggggcgttcggggtctcgtcacctacctcagagaagttgtatacccaacccttctctaccatccaagactcatgtttagcaggaaagtcagtctttacgtgagcgtgttccggaatcatctggcccggcaacaaatagatagcgtgagcgaaatacttatactccggatcgttgatccagaaaataccacccatacctacattttcgaaatcgcccaagccaaagtctgtcacccacatatctttcgccatcaactccgtgaaaggaacatcgtagaaagcaaacatatctttcatcgcttccatagcgacatcttgttgaaacttgccgtctttataaaaatcggcgttcgtgtacttctttgaataagccattgttttatttttttgattgttagtattacatgcgttcgtgcattctttgcggcaagttccttccggacaattgccctccccgttagcggcgcaacaagtagcgtctgtcgttgtctttcccgtacatgcgaccatagataccaacaccaatcccatagccgccattttcatgttcaaaccttttctcatttgtttttgtgtatatttgttagtactatttgtttcaacgtatcgctattccctcgatctcgatcaataactcatcccggcaaacgtcggcccacatataagagatcgggatatttaatccgtaggtattcatcaaacgctcagcctccttatagtcggatttattcttcaagtagactcgtaacttaaccaatttagcgtcagcgatcagttccgctatattttccatcgtgatccgtagctgacgttccagacctactcccgtcaagctctcctcaccacggatagcggctgtaccggaaatataaatcaatttacgatcctgaaaagtcatgctcttggcacgctcgaacttaggggtcgtcttcttttgtcgggcaacttccagtacttgttccgaatacgcatgggcagccacctgcaacttattatcgatcggcgtagcgaaagcatccggcgtagtaaacacggcggcatccacatcgatcaagatacctcccagattcgccccgatacccgtagcggcaggataaccattcgcccattccgttttactataaaaatcagatcgggcgttattaaacgcttgataatgctgatccggaccgtcgaaagcggttatacgctcgatataattccactgacggataatgctattcaacggaaaaccctcccgacgaagcacatcccccaataaccggaaagcttccaccgactgaggctctataccaaaatggagtacatccccttgaaaaccgccggcaaaaaggaaacgtcccgaggcattctccaacaagacataaggaacaccttgataatgacggaaagtaatccgatcctgcgcatcgggcacatagctatgtacctccatcagcaaaggagcgttcagcggcggttgggagacatagctcaaagccggttcgcaatccccataataccgacggatcttctcccgcagcaaaacccggcgtgccacgtattcctcatttgtacccggagtaccgaaaaaggccaacctcatgatcacctcgttttgaggcaattgagacaatagatcgtccaccataacggcgaactcggcccgcttggtgcttaatatcgtataatgtatcttctcacaataattcatatccttttattttacagggagtttacatattccgttaacgcctcgatatctttcttggaaacctttttatcgatgccatgcttatggacctcgaacacctcttccatggtagccgcacgcccatcaaacagataaggagccgtacgccagacctcgatcaaagtaggtgtatcccaccctttctcaaattctatatcctcgccgatacggtgcatcttcatatccgtataataaggaccgctatgacactcgccacatttcagtttctcaaacacctttcttccctctttcgccttatccgataattccccatttactaaatacgggctaggcaccggacgcaaggatttcatataagcgtccacacatttcgccatttcctcttctgactcaaaaaactgaatgaacttaaaaccggcacgtaccgcatattctgcgctctcacgaacacccgagatcatgcttgggggagtcacatgcgaatacaacatgctcttacaattcttcgagttaccaactccatcattcatcaagtcccagttcatcccgtccgtacgggcatcccccggatggcaaccgttacaactctgccagccttgatagcaatgatttgcgtcgttaaagtatttctcgcccttgttctccggcgtttccgtacgccccggattcatgtcggtagccgtcacctccaatgtatttatatcgacggtattcaagatatcggcgaaataagtagggattatcaacttatctcccgaaaatataaaatttcggggaccgtttccttgtaaggtaactcgctcacgaagtccatacaagaaattcaagtcgtaatccagacggctcttatccttataagactcaaacttcgccaacatcgccggatgatcgatcacgctcacctcatgcgttccgctatgcgtgataaagatatgcttgtcatcgcaagcgatactccagataccggcagcgccacgatccggctcgtccaccaataccgccccaacgaattcctgcttcgccacatcgatcacgctgaaagcgctcgtgttcatccaaccttgttgaagttgggaagtaggcaccgtgaatcgtcccaagttatgagacacgtatatatatttcccgtccggcgtgatacacatcccccgtaaggcattgctaccattcgccaattggatatctttcactttcgtaaacccctccatctcgattactgatacgcaagcggccaccacatccacgtccgcccgttgtgcgggcaggaaattcgtaacaaacatatacttgccatccttgctgaataccgccgatttaggctcacgcaacactttcacgctccggactaccttacgcatcaccggatctatctcgaccaccgaattatcgaactgattacatacatatatatgtttcttatccggcccgaacatcggatgacaggctcccgatcccgtcggtatagccgcttccaccctacccgattccaaggaaagcacttgtaaacggccggtcttctcgaaggtcgtcacatacaccttatccccatccggaagcaacccggtcgggatctcatcaaacggaaacgaatgaagtaagctcttaccgtccgctgaaaaaatatccagatgtctcgttcctttctgtgtcattaatagctcccccttcgcattcaatacggcatccgtagtaaagaaaggtgggttgccggctgaagcgagagaaacgcaacagccgacaagacaagccaccaatgagttttttatcaagtattttcgtgtgttcatggtatattttgtattccttattttctaaatcctagttcgttcgagatcaccccggcaatctccttgatcaccttcaccgtatttttcaccacctctttcgataagcggtctttcgggccggagatccaaatcgctccacaaggatatcccgtataattaaagatcggggcgcctacgcagatcacgccgctcagctcctcctcattatccatggcatatcccagcttaccaaccttctccaattcctccagataggcctcacgagaagtgatcgtccgggaattataccgtgtaaacgtcatgtaggacaggtaacgatctcgcaccgtcttcggcaaataagccataatcgcctttccgggagccgaacaatgcaactcaaacggctttcccggcgacaggacgaagcggaacgtatgatgtccttgcgcttgttcgataaaaatccctttctcatctcccaagacaccaaagcaagcggtctctttcacttgatcacgtaaatcacgcaaatgtggcaagacggtctctaagagattgtgttcattcaaggatctgaaaccaagggtcaataattttcgggaaagtttatagcgtttcgtgtcttcactaaaattaagatattccagccgcaccaatgtattcaaaatacggtaagccgtagtctgagatatatcgagcgccgacttaatatcttgcaatgtttctcccgccgaccgcaaggaaaggtactcaagaaccgctatgcccttctctaaattaggcactttgtagctctcatccactttttccatatttggcagcgtgttttccatatttgaaattgcatttcagatttgaaccaaatatagcagtgatgaatttaaacaagacacgaaatatgtaaaaaggtgttaagtatgttgcagagcatataaatccttaaaggaaaatgatcaattctttttgatttacaatgattttatctcttatatacatattatttacctactttcgcggaatatccttgaaagcacaaggatataagtgcattcataaacgagcaagaatacaaacatgacaagcgaaagcaaaaaagaaaagttaaataaaaacgagctattagctaattatcaatatctcatggatacgatctggactatctatttggaagacggaagcgtcgatatacttaaatattcaatgaatccggaattaattaatacaaaacaagattataccagccttgccaacattctaagaaacgacatctattctccagaccgtagtttatgggatgaaacggtttcgcttgaagctttctttagaatgatagccgaaggatgttttcataaaacatttgacttacgtttctgcaacgatcacttcggttttgaatggcacgaaacttttatcgatattcttgttaacaacgaaggtatccctgatagaatccttttatctagccgtaatatcaacgatttcagaaaagcgcaaattatagaaaccgccgtaagatcagaatatgattacgtaatctatattgaagcttcgaaaaatagctatgtcatgtatacctccggctcggagagctatagtccccctcctatcgccagctatgactatgatggagtagtcgcctcatataaccggcaatatatggcacctgagcttcacgaagaaatgactgagaaactacagatcgctcatatagaaccgatactacggaaacatggagaatatatcgtatatggcaccatgatagagaatggcgtaaaccgggaaaagaaaatgcgattcagctattacgacagggaaaagaacatatggttaatgactcgaactgatataacggaaatcaaagaagaaagaaaacaaaaaaaactgttgcaggaagctttacagagcgctaatgccgccaaccgtgccaaaactgatttcctatcccggatgagccatgacatccgcactcctatcaacgccatcgtcggtatgacagcgatagctggcctgcacatggatgaccagatgcgtatagctgattgcttaaagaaaataaccatttcctccaaactcttattaaatctgatcaatgaggtactggatatgtctaaactggaaagtgataagatcatgctgacagaagaggcattcaagatcaacgagctattagagagtttattcgtcatggtgcaaccggcctttgaagcgaaaaagcaaaagtttcagatacatgtcaccaagataaaacacgaatgccttataggtgacgtgcaacgtatacagcaagcattgttgaacatgcttacaaatgcgatcaaatatactccggaagacgggcaaatacaactaacggtagaagagaaaccttctgtctataacggttacggccagtttgaaataaccgtaacggataacggtataggaatgaaaccagaatttctggaaaaagtattcgaacctttcgagcggtcggatgacaaggccattcgcaatatccaagggactggtctcggcatggctatcagccgccatatcgcccagataatgaacggagacattcttgtggaaagtgaatatggaaaaggctccaaattcaccatgaggtttcatgtcaaactgggaagtacgaataaatacgacaataatatattggtagacctaccagtactggtagtagatgacgatgaggtatcctgcgagatcgcttatgaaaacctccaagaattagggatgaaaccggaatgggttctttccggtgaaaaggccgtacaaaaagtaatcgacggagacacttactttgctattatcatagatttaatgatgcccggcatgaacggcatcgaaaccaccataaaaataagggaatacgtggaaccagatactccgatcatcatcatatcagcatacgattattccggttacgaatttgaggcagtaaaagctggcgtcaacggcttcataagcaagcctatcatgaaatccaagctattccatttaatgaaaaaatttgcctcagacaaaaaggaagacgagcaagtccttatcacaccgactcatatcatatcttttcccggcaaacggatactggtcgtggaagacaatgacctaaaccgcgagatagcgtatgaattgctgcaagaaacccatgcagaagtcgagacagcttgcgacggacaagaagccgttgataaagtcgccgcttcacccgaaggttattacgattttataatcatggatatacagatgcctgtaatggatggactcgaagcgacaaggcaaattcgtcatctcgaccgtcaagatatcaaagatatgcccattatagccatgtctgccaatgctttcgccgaagatgtacggctaagtctggaagccggcatgaacgaacatatcgcaaaaccgatcgagatagacaaattatatggaattatgaggaaatggttccagtaaaaaaagccggaatctcttccggccttctccaaactcaatgaatcacctttttacttcttgcaatcgcaagttgaatatgctaccaacatccaaaccaatttttcttgttccttcagatagtcactcatcaacgctaccgtagcctcatcgcccgcctccgatgccaaggaaagaagtttacgctcctcaccaatcagcaggccataggtatcgagaatatgtttcaatgcctcgtcaccacaggatacgcctgatacctcttttacacgggctactttcaggtactcgctgaacttgttctccggctcgcctcccaacatcaggatacgttccgccaactcgtcaaccttctcggcagcgttgttgtacatatcctcgaatttaccatgaagaacgaagaaaccgtgtcccttgatattccagtggaaaccacgaaggttcgtataaaatacttggtagtccgccaataattgtttcaagcttgctactacgttacttaccgctgatgcgtctaaatgaagataatctaatgttttcatactgctatttttttaattgttatactttccgttttcttatactgcaaagatatggtaaatataaacagctgtcaaacagataattcctatatacatatagatagaatctatatttaaacgatcaacaggaagacatgcgatagaacttaggtttctatttacccaatttaaacttatatcctgcggtaagagccaaggtatggtaattcgcctcgatagatcctcccttatactctttacctaacgatacatcatagccaaaattgataaagcattgttttatttccacacctacagtggaacttataccccaatcaaaagcacgaagcccttcacagggatcatgggtataaaacttagcggattcttccgaagcgacagaccatcccccgaacattcctttatccaatacgcttacggctatataagggcctactccgacattcaaacgaatatcctcagctaatttgaacgataaattagccataatcggtaattgcaagaaatttcgtgtcaccttatttgagtaatcatacgcatatccatacggatcataagtaggtcccggcacagtccaccaataatgcccatatccatatccggggaattggtcattactatatcccctttgcgtataatacagaccggacttcagagaaagaaattccggcttcaactgatattccactcctaccccaatcttccaactcggtttccaatcaaccattggacccgccttcatcactgtcatacccgcttccggaactaccgaccactgggcttgtaccgatactacacccagcattaacaccatcgcaaatactacaactcttttcatatactttttattttgataaaataatcgaacgatatatatgaataagacatgaaacaataaaaaacccctattggcaccaacagaaaaaggccggaatcacttccgaccttctccaaacgcaatgaatcaccttttttacttcttgcaatcgcaagttaaatatgctactaacatccaaaccaacttctcttgttctttcagataatcactcatcaaagcgaccgtagcctcatctcccgccccggatgccaaggaaagaagtttacgctcctcaccgatcaaataaccatacgtatcaagaatattctttaacgcctcgtcaccgcaggatacgcctgatacctcttttacacgggctactttcaaatactcgctgaacttgttctccggctcgcctcccaacatcaggatacgttccgccaactcgtcaaccttctcggcagcgttgttgtacatatcctcgaatttaccgtgaagaacgaagaaaccgtgtcccttgatattccagtggaaaccacgaaggttcgtataaaatacttggtagtccgccaataattgtttcaagcttgctactacgttacttaccgctgatgcgtctaaatggatataatctaatgttttcataattgctactttttaatttgttatactttctgtttttcttataccgcaaagatacggcaagtataagtagctgtcaaacagataatttttatatcaagatagaggagatttattaaactattccatacaataagtatgcaaatgacatgaatacataaataattggatactaacattttaaaaagacgattatcattttcgaaaaacacgtacgtgtttttttgaaaagtcgtacatgtttttcgggaaaactgaagtgaacccagaaagttggacggttaataaataggattagtggattgagttctaaattgtatggggctcaatcctcctaatcccgttttaattctataattattgtaatagtatatatactcatttagttcgtgaacaaattgttccatattctcaaactcccgcaaatatagtaattcagattttaatagtccgaagaagttctctattactgcattatccaaacagtttccctttcttgacatactctgtactattcctttttttctgagcatctgttgatatgttggatgctgataatgccaaccttgatcagagtgaataattaagtctacgtcatcaggcaagagagtaaaagccttttttaacatatccgtaaccatagataaattgggactttcagttattgtaaaactgataatctctcgattatacaaatccatgatgggagataaatacctttttgaaccaaaaagagagaactcgctgacatctgttacccatttctgattaagagcggtcgtagagaagtcacgttccaatatattaggagccactttaccaactgttcctctataagtattatatttctttcttctgaccatacattttaagtcgcattggttcattagttttagaaccgttttgtgattcaggttatatcctctttggtttagtcccagagtgatacgcctatatccatacctaccatgattctcatgaaatatttgacatatcatttttttctcttcttgatatttatctggaagggaaaatttctgaatgtaataatgatatgtacttttagccatcccggaagctttcaataaaacagaaaacttaaattcatgccttaattcttggatggcggcaaccctttcttgctttctcgggcaatgcgttcctgaactaaggctctcaatttttttaggtatgcgttttctgctttaaggagttctatttccttaagtaaatccttattatcttttggtttaggatctacaaactcttctggttctttaaaaagatcattttcttttgttatcatatcttcagaccatagtcggctacctccatgaagaccggataagcctacattcttatacttacgttgccacattaatacggtacttgggctggggataccatattttaaggcagcttcttgcaaagataaatgattttcaaatacatcttggagtactttatacttaaaatcaacaggatagtatctatgttgcatacgcaatccctcttctccataacgggagtataaagaaacccaatatttgacttgacgtggatttacatcaaacattttacctgttgtacgtaaaggcaaatgctcacacaaaactttggctactacttgtaaccgcacagaataaggatgtttctcgtacttctttcgtttgttagacataatgaaattgatttatatccaactttctgggttcacttcaaaacacgtacgactttttacagaatcatacggcaaggaactagaacatacataaaaatataagataagtctccctttttcagaggacccaaaagcatttcccccaaaatcccctactcgaatcctcgctctatggaaaacagatactccggcgacatttactaacattgagatttctccatgcttctgcgcttcgtctatcaagctcagaatagacgagcgtgaggacaagtccatttccatcggcagtacgtcaaatccggcattgttcattgtctgggcaataatcgctgcattattcatactgtttttttccttaaaaaggttaccttcgcggaaacaagatatcgctttggaagtacaagaattattgaaactatatgccgctcacccgcaagtgacggcgctggacaccctactgaaaaacgatacgtcccgcaatatattcctaaagggactgaatggctcgggtccggcgatgacgatcgcctctctttttacgaaaggaaggggaagctatgtgtgtgtgttgaacgaccaagaggaagccggctatttctatcacgacttgatgcagcttaccgccagcaatgaggtatacttcttcccatccgcttaccggagggccatcaagtacgggcatgtcgatccggcgaacgagatcctgcgcaccgaggtactcagccggttgcaagacccggacgcctctttcgtgatcgtcacgtatccggacgccttggcggaacgagtcgtggcccgggaggtattgaaggagaataccttaaaaatcagcgtgggcgagaagctggataatatgtttgtctctgacgtgctggacgagtatggcttcgagcaggtcgattatgtatatgagccggggcagtacgccctccggggcagtatcctcgacgttttctctttctcctacgagttcccctaccgtatcgactttttcggcgacgaggtggagaccatccgtacgttcgacgtggagacgcaactcagcaaggagaagctggacagcatctatatcgtaccggagatgagcaagaacgccaaggatagtacttccttgctaggctccctcccccggaacaccttcatagcggcgagagatctcgcatggtgcaaggagcgcatcggaagcgtatggaacgacgatccggtggtagccgacgaggaatccttcgccgatatcgaccagatgcggaagaaattagtccggggcgaggacttcctacgggaggtattggatttccgtcgcatccatttcggggcacggccgatgggaacggcggacgctaccatccacttctctacgcaaacgcagccgatctatcataagaatttcgaccgggtgagcgagtcgttccataaatacctcgacgagggctatacattatatatattgagcgatcaagagaaacaagccaaccgtatccggatgattttcgaggataggggcgacaatatccctttcaccgccgtaaaccgcacgatacacgagggattcgccgacgatacgctacgcatctgctttttcaccgaccatcaattgttcgaccgcttccacaagttcaacttgaagagcgataaggcacgaagcggaaagatcaccctttcgctcaaggaactgaaccagttctcgcaaggggattatatcgtacatatcgaccatggcgtaggacagttcgggggattggtacgcaccgaggtgaacggtaagatgcaagaggccatcaaattgatttatcagaataacgatattatattcgtcagcatccattccctgcataaattatcgaaatacaaggggaaagagagcggcgagccgcctaagttgagcaagctcggcacaggcgcatgggaaaagatgaaggaacgtaccaaggcgaaggtgaaggatatcgcccgggacttgatcctcctctattccaaacgcaagcaagagacgggtttcgcctacacgccggacagcttcatgcagcatgagctggaagccagcttcatctatgaggacacgccggaccagatgaaggctaccgccgaggtcaaggcggatatggaaagtacccgtccaatggaccggttgatttgtggagacgttggtttcggaaaaaccgaggtggctatccgcgcggcattcaaggcggtatcggacaataagcaggtggccgtgttggtacccaccaccgtactggctttccagcattaccagacgttttgtgagcgcttgaaggatttcccttgcaagatcgattatatcagccgggcccgtacggccgcgcaaatcaaggctaccttgaaagagctgaaagagggcgaggtgaatatcttgatcggcacccaccggatcgtcggcaaggatgtacgtttcaaggatctgggcttgcttatcatcgacgaggagcagaagttcggggtatccgtcaaggagaagcttcggcaactgaaggtgaacgtggacaccttgacaatgacggccaccccgatcccccgtaccctacagttctccttgatgggggcccgggatctttccagcatcaccacgccaccgcccaaccgttatcccgtgcagacggaggtggagcgtttcaaccccgatatcatccgggaagcgatcaatttcgagatgagccggaacgggcaggtgttcttcatcaacaaccgtatccagaacatttacgagatggaagccttggtacggcgagaagtccccgacgcacgggtagccgtggggcacgggcagatggaaccggagaagctagaaaagatcatcctcgatttcgtgaattatgagtatgacgtattgatagccaccagtatcgtggagagcggcatcgacgtgcccaacgccaacaccatcatcatcaacaacgcccagcaattcgggcttagcgacctccatcagctacgcggacgtgtaggacgaagcaaccggaaagccttctgctacctcctttccccgcccctcacctcgctgacgcaggaggcacggcgcaggttgcaagcgatcgagaacttctccgagctgggtagcggtatccatatcgccatgcaagacctcgacatccggggggccgggaatatgctaggcgccgagcaaagcggtttcatcgcggatctgggttacgagacgtaccagaagatcttggaggaggcggtagacgagttgaaaagcgaggaattcgccgatctttacgccgataacaccgaagggcaccgggatacgggcagcgagtacgtccgggagacctatatcgagagcgacctggaattgatgttccctcccacctacatccccaacgactcggagcgtatctccctataccgggagttggataatatggaggaggaacgtgatatcctcgcctttacggagcgcctgaaagaccgcttcggcaagataccgaaggagggcaaggagttgatccggatcgtgcgcctccgccgcatggccaagaaactgggcatggagaaagtgatcctgaagaaagggcagatgagcctcttcttggtgaataacccggatagcccgtattaccaaagcgaggcgttcggcaagctgctgggcttcatccaaaagcatccccgtgaatgcaacctccgggagcagaatggcaagcgaagtatcgtgatcaagaacgtccctacggtggaagcggcatgcggctacctgcaagagatggaaaaaataaactcaaccaacttttgacacatcctcttacaaacacgaaaagatatggaaaagaaaacgattatagacctttttgagagttcagccaagcgattcccgagtaatccttttttatgggagaagacgggcaagcgattcgagccaaccacttacgccgaggttcgcgacctcgtctatgaggaaggcgccggcctcatatcgctgggtgtgcgaaagggggataatatggctttactgagcgaagggcgcaacgcgtggatcatcggcgagctggccatgttctacgccggggcgacgaacgtgcccctatcgatcaagctggaggaggcgaacgacctcctgttccgtctcgtccacgccgacgtgaaatatatcatggtatcgggtcagcaactcaagaaaatccgggcgatcaaggataagctccccgccgtacggaagatcatcgtactcgacgagcaagcggaataccaagaccgtgagatgtcgctgtccgagatacgccggatggggaaggtctatctgggtattcatccgctagaggagttcttggcgatcgggcaatcgctgggcaacgatgattacgccaccatcacctatacctccggcacgaccgccgatccgaaaggcgtgatcctcacccaccgtaactatacggcgaacgtggagcaagcgctcacttgcgtggatatagacgatacgtggcgtacgttggtgatactcccgct
